(19) United States
(12) Patent Application Publication
(10) Pub. No.: US 2024/0335505 A1
(43) Pub. Date: Oct. 10, 2024

(54) PRODUCTS AND METHODS FOR PROMOTING MYOGENESIS

(71) Applicant: Ecole Polytechnique Federale de Lausanne (EPFL), Lausanne (CH)

(72) Inventors: Martin Wohlwend, Renens (CH); Johan Auwerx, Buchillon (CH); Ulrik Wisloff, Jonsvatnet (NO); Jose Bianco Moreira, Seritinga-MG (BR)

(21) Appl. No.: 18/271,503

(22) PCT Filed: Feb. 10, 2022
(86) PCT No.: PCT/EP22/53229

§ 371 Date: Jul. 10, 2023

(30) Foreign Application Priority Data
Feb. 11, 2021 (GB) 2101932.8

(51) Int. Cl. A61K 38/17; A01K 67/0275; A61K 31/409; A61K 48/00; A61P 21/00; C12N 5/077; C12N 15/113; C12N 15/115; C12Q 1/6876

(52) U.S. Cl. CPC A61K 38/1709; A01K 67/0275; A61K 31/409; A61K 48/0033; A61P 21/00; C12N 5/0658; C12N 15/113; C12N 15/115; C12Q 1/6876; C12N 2310/11; C12N 2310/12; C12N 2310/14; C12N 2310/531; C12N 2506/1323; C12N 2510/00; C12Q 2600/124; C12Q 2600/156

(57) ABSTRACT

The present invention relates generally to the field of long non-coding RNAs and transcription factors and modulation of their expression for use in medicine and agriculture, such as the treatment and prevention of diseases associated with muscle atrophy and the production of livestock. More particularly, the invention provides agonists of Cytor, a long non-coding RNA, e.g. agents that increase the amount of Cytor RNA in skeletal muscle as well as antagonists for Teadl, a transcription factor, e.g. agents that decrease the amount of Teadl RNA or protein in skeletal muscle and their use in therapy.

### RELATED APPLICATIONS

[0001] This application is the § 371 National Stage of International Patent Application No.: PCT/EP2022/053229, filed Feb. 10, 2022, which claims priority from United Kingdom Application No.: 2101932.8, filed on Feb. 11, 2021. The contents each of the related applications are hereby incorporated by reference in their entirety.

### SEQUENCE LISTING

[0002] This application contains a Sequence Listing in ASCII computer readable form. The Sequence Listing is incorporated herein by reference. Said ASCII file, created on Mar. 12, 2024, is named VPH-02401_SL.txt and is 1,008,819 bytes in size.

### FIELD OF THE INVENTION

[0003] The present invention relates generally to the field of long non-coding RNAs and transcription factors and modulation of their expression for use in medicine and agriculture, such as the treatment and prevention of diseases associated with muscle atrophy and the production of livestock. More particularly, the invention provides agonists of Cytor, a long non-coding RNA, e.g. agents that increase the amount of Cytor RNA in skeletal muscle as well as antagonists for Tead1, a transcription factor, e.g. agents that decrease the amount of Tead1 RNA or protein in skeletal muscle and their use in therapy. Such agonists and/or antagonists have therapeutic uses in diseases and conditions associated with muscle atrophy and dysfunction. The invention also contemplates the modulation of Cytor RNA and/or Tead1 RNA or protein in myoblasts and skeletal muscle, e.g. via genetic modification or gene therapy, in therapy and to enhance meat production, both in vitro and in vivo. The invention also provides a modified non-human animal with increased levels of Cytor RNA and/or decreased levels of or no Tead1 RNA or protein, products derived therefrom and methods of producing such animals. Various diagnostic methods relating to Cytor expression and/or Tead1 expression are also provided.

### BACKGROUND TO THE INVENTION

[0004] The non-coding genome encompasses a variety of transcribed RNA molecules, e.g. miRNAs, siRNAs, piRNAs etc. One class of non-coding RNA molecules is termed long non-coding RNAs (lncRNAs) and refers to polyadenylated RNA molecules that are >200 nucleotides in length. LncRNAs represent a large fraction of transcribed but not translated genes and have been associated with regulation of multiple cellular processes, including cellular plasticity. Transcription of lncRNAs it thought to be tightly regulated, both spatially and temporally, and changes in the expression of some lncRNAs have been linked with various diseases, including cancer. However, the endogenous functions of most lncRNAs remain unclear.

[0005] Transcription factors (TFs) are proteins that controls the rate of transcription of genetic information from DNA to messenger RNA or non-coding RNA, by binding to a specific DNA sequence. The function of TFs is to regulate the expression genes in the right cell at the right time and in the right amount throughout the life of the cell and the organism. Groups of TFs function in a coordinated fashion to direct cell division, cell growth, and cell death throughout life; cell migration and organization (body plan) during embryonic development; and intermittently in response to signals from outside the cell, such as a hormone. There are up to 1600 TFs in the human genome.

[0006] Skeletal muscle is one of the organs most affected by ageing exemplified by estimated yearly losses of ˜1% muscle mass and 3% muscle strength in the elderly, resulting in an accumulated net loss of >30% muscle mass during ageing. Sarcopenia, a degenerative geriatric syndrome recently recognized as a disease by the WHO, is defined as the progressive deterioration of skeletal muscle mass and function with age. With a current estimated prevalence of 10% in the general population—a number that will increase with the ageing population—sarcopenia is already one of the leading causes of frailty, loss of independence and quality of life in aged individuals and constitutes a risk factor for all-cause mortality.

[0007] Skeletal muscle ageing has repeatedly been shown to primarily affect fast-twitch, type II muscle fibres. Aerobic type IIa and glycolytic type IIb muscle fibres decrease with age in number and fibre area compared to slow-twitch, type I muscle fibres in humans and rodents, thereby primarily contributing to the age-inflicted loss in muscle mass and strength. Despite knowledge of the muscle fibres primarily affected by aging, in the absence of a more comprehensive knowledge of the molecular players involved in type II myogenesis, there has been limited progress in the development of pharmaceutical agents needed to treat the decline in muscle function and mass observed in ageing and other diseases associated with muscle atrophy.

[0008] Exercise is a well-known modulator of muscle mass and function, in young and aged subjects, and has been documented to both prevent and ameliorate sarcopenia. Interestingly, exercise-mediated maintenance of muscle mass and strength at old age is largely attributed to promotion of type II muscle fibres. However, mechanisms underlying the exercise-mediated biogenesis of type II fibres in the ageing muscle are not well elucidated. Moreover, as exercise-based physiotherapy is not suitable for all subjects with sarcopenia or other diseases associated with muscle atrophy, there is a need for alternative (e.g. pharmacological) therapies that target type II muscle fibres, e.g. for improved growth and function.

### SUMMARY OF THE INVENTION

[0009] The present inventors have determined that Cytor, a conserved lncRNA, is an exercise-induced lncRNA in mouse, rat, and human skeletal muscle. The inventors have shown through genetic manipulation of Cytor expression in vitro that Cytor regulates myoblast differentiation into type II myotubes. Moreover, as described in the Examples below, CRISPR-dCas9 mediated rescue of endogenous Cytor expression in aged mice ameliorates ageing-inflicted impairments in skeletal muscle function, mass and proportion of type II fibres. Furthermore, direct Cytor overexpression using CRISPR-dCas9 in aged human myoblasts improves differentiation into type II myotubes.

[0010] Using C. elegans as a model of ageing, the inventors observed that forced expression of human Cytor under a muscle-specific promoter rejuvenates muscle morphology and improves movement in aged worms, demonstrating the functional potency of human Cytor. The inventors have also identified a causal cis-eQTL, rs74360724, located within an enhancer regulatory region, whose minor allele A promotes Cytor expression in human skeletal muscle and associates with fitness in aged individuals. Similarly, the identified a causal cis-eQTL, rs79200838, located within the Tead1 gene, whose minor allele T reduces Tead1 expression in human skeletal muscle and associates with fitness in aged individuals.

[0011] Whilst not wishing to be bound by theory, it is hypothesised that Cytor reduces chromatin accessibility at binding sites of the transcription factor Tead1. Tead1 silencing has previously been shown to specifically promote type II muscle fibres in vitro and in vivo. Accordingly, it is thought that Cytor's effect on differentiation of myoblasts into type II myotubes is dependent on Tead1.

[0012] It is furthermore demonstrated in the appended examples that the co-overexpressed of Cytor and Tead1 reduces myotube area, myofusion, and abolishes expression of type II myosin isoforms. On the other hand, the silencing of Tead1 mRNA expression by a specific small interfering RNA (siRNA) or the inhibition of Tead1 protein by the Tead1 inhibitor verteporfin was sufficient to increase myotube area, myofusion, and induce the expression of type II myosin isoforms.

[0013] Based on these experimental findings, the inventors propose that modulating Cytor activity and/or Tead1 activity provides an attractive therapeutic strategy to boost muscle growth and function in diseases and conditions featuring muscle atrophy, such as sarcopenia. Gene therapy and/or pharmacological agents that promote Cytor expression and/or function and/or decrease or prevent Tead1 expression and/or function are expected to improve myogenesis and hence, skeletal muscle growth and function.

[0014] Accordingly, in one aspect, the present invention provides a Cytor agonist (e.g. an agent that increases the amount of Cytor RNA in skeletal muscle) and/or Tead1 antagonist (e.g. an agent that decreases the amount of or entirely depletes Tead1 RNA or protein in skeletal muscle) for use in therapy.

[0015] In this connection the conjunction “and/or” means that the Cytor agonist and the Tead1 antagonist may be used alone or in combination. In this respect it is particularly preferred that the Cytor agonist is used and optionally in addition the Tead1 antagonist. It is expected that the Tead1 antagonist enhances the desired therapeutic effect of the Cytor agonist, and vice versa.

[0016] Alternatively viewed, the present invention provides a method for treating and/or preventing a disease or condition (e.g. disease or condition associated with muscle atrophy) in a subject, which comprises the step of administering a Cytor agonist (e.g. an agent that increases the amount of Cytor RNA in skeletal muscle) and/or Tead1 antagonist (e.g. an agent that decreases the amount of or entirely depletes Tead1 RNA or protein in skeletal muscle) according to the invention to the subject.

[0017] The invention also provides the use of a Cytor agonist (e.g. an agent that increases the amount of Cytor RNA in skeletal muscle) and/or Tead1 antagonist (e.g. an agent that decreases the amount of or entirely depletes Tead1 RNA or protein in skeletal muscle) in the manufacture of a medicament for treating and/or preventing a disease or condition (e.g. disease or condition associated with muscle atrophy) in a subject.

[0018] In another aspect, the present invention provides a Cytor agonist (e.g. an agent that increases the amount of Cytor RNA in skeletal muscle) and/or Tead1 antagonist (e.g. an agent that decreases the amount of or entirely depletes Tead1 RNA or protein in skeletal muscle) for use in promoting myogenesis in skeletal muscle of a subject.

[0019] Alternatively viewed, the present invention provides a method for promoting myogenesis in skeletal muscle of a subject, which comprises the step of administering a Cytor agonist (e.g. an agent that increases the amount of Cytor RNA in skeletal muscle) and/or Tead1 antagonist (e.g. an agent that decreases the amount of or entirely depletes Tead1 RNA or protein in skeletal muscle) according to the invention to the subject.

[0020] The invention also provides the use of a Cytor agonist (e.g. an agent that increases the amount of Cytor RNA in skeletal muscle) and/or Tead1 antagonist (e.g. an agent that decreases the amount of or entirely depletes Tead1 RNA or protein in skeletal muscle) in the manufacture of a medicament for promoting myogenesis in skeletal muscle of a subject.

[0021] In another aspect, the present invention provides a Cytor agonist (e.g. an agent that increases the amount of Cytor RNA in skeletal muscle) and/or Tead1 antagonist (e.g. an agent that decreases the amount of or entirely depletes Tead1 RNA or protein in skeletal muscle) for use in increasing skeletal muscle mass in a subject.

[0022] Alternatively viewed, the present invention provides a method for increasing skeletal muscle mass in a subject, which comprises the step of administering a Cytor agonist (e.g. an agent that increases the amount of Cytor RNA in skeletal muscle) and/or Tead1 antagonist (e.g. an agent that decreases the amount of or entirely depletes Tead1 RNA or protein in skeletal muscle) according to the invention to the subject.

[0023] The invention also provides the use of a Cytor agonist (e.g. an agent that increases the amount of Cytor RNA in skeletal muscle) and/or Tead1 antagonist (e.g. an agent that decreases the amount of or entirely depletes Tead1 RNA or protein in skeletal muscle) in the manufacture of a medicament for increasing skeletal muscle mass in a subject.

[0024] In another aspect, the present invention provides a Cytor agonist (e.g. an agent that increases the amount of Cytor RNA in skeletal muscle) and/or Tead1 antagonist (e.g. an agent that decreases the amount of or entirely depletes Tead1 RNA or protein in skeletal muscle) for use in preventing or treating skeletal muscle atrophy and/or skeletal muscle dysfunction in a subject.

[0025] Alternatively viewed, the present invention provides a method for preventing or treating skeletal muscle atrophy and/or skeletal muscle dysfunction in a subject, which comprises the step of administering a Cytor agonist (e.g. an agent that increases the amount of Cytor RNA in skeletal muscle) and/or Tead1 antagonist (e.g. an agent that decreases the amount of or entirely depletes Tead1 RNA or protein in skeletal muscle) according to the invention to the subject.

[0026] The invention also provides the use of a Cytor agonist (e.g. an agent that increases the amount of Cytor RNA in skeletal muscle) and/or Tead1 antagonist (e.g. an agent that decreases the amount of or entirely depletes Tead1 RNA or protein in skeletal muscle) in the manufacture of a medicament for preventing or treating skeletal muscle atrophy and/or skeletal muscle dysfunction in a subject.

[0027] In another aspect, the present invention provides a Cytor agonist (e.g. an agent that increases the amount of Cytor RNA in skeletal muscle) and/or Tead1 antagonist (e.g. an agent that decreases the amount of or entirely depletes Tead1 RNA or protein in skeletal muscle) for use in improving skeletal muscle function in a subject.

[0028] Alternatively viewed, the present invention provides a method for improving skeletal muscle function in a subject, which comprises the step of administering a Cytor agonist (e.g. an agent that increases the amount of Cytor RNA in skeletal muscle) and/or Tead1 antagonist (e.g. an agent that decreases the amount of or entirely depletes Tead1 RNA or protein in skeletal muscle) according to the invention to the subject.

[0029] The invention also provides the use of a Cytor agonist (e.g. an agent that increases the amount of Cytor RNA in skeletal muscle) and/or Tead1 antagonist (e.g. an agent that decreases the amount of or entirely depletes Tead1 RNA or protein in skeletal muscle) in the manufacture of a medicament for improving skeletal muscle function in a subject.

[0030] The Cytor agonist and/or the Tead1 antagonist may find utility in improving or promoting various attributes of skeletal muscle simultaneously, e.g. an increase in muscle mass may also result in an increase/improvement of muscle function. Thus, in some embodiments the Cytor agonist and/or the Tead1 antagonist may result in a combination of any of the effects set out above. For instance, the Cytor agonist and/or Tead1 antagonist may be for use in promoting myogenesis and muscle function. Similarly, the Cytor agonist and/or the Tead1 antagonist may be for use in increasing skeletal muscle mass and function.

[0031] In connection with all the above medical uses and method of treatments the Tead1 antagonist preferably and in particular results in fast-twitch muscle fiber promotion. The two types of skeletal muscle fibers are slow-twitch (type I) and fast-twitch (type II). Slow-twitch muscle fibers support long distance endurance activities like marathon running, while fast-twitch muscle fibers support quick, powerful movements such as sprinting or weightlifting.

[0032] In a further aspect, the invention provides a modified (e.g. a genetically-modified) non-human animal which has an increased amount of Cytor RNA and/or decreased amount or no Tead1 RNA or protein in its skeletal muscle in comparison to a corresponding unmodified non-human animal.

[0033] In a still further aspect, the invention provides meat or a meat-containing product derived from the modified non-human animal of the invention.

[0034] In another aspect, the invention provides a method for producing (or generating) the modified non-human animal of the invention, the method comprising: (i) providing a non-human cell (e.g. a non-human pluripotent stem cell or germ cell) which has been genetically-modified such that myoblast cells derived from said cell express an increased amount of Cytor RNA or a decreased amount of or no Tead1 RNA or protein compared to unmodified myoblast cells; and
[0035] (ii) generating a genetically-modified non-human animal from said genetically-modified non-human cell (e.g. non-human pluripotent stem cell or germ cell).

[0036] In a further aspect, the invention provides an in vitro method for producing muscle fibres comprising culturing modified myoblasts which have increased amounts of Cytor RNA and/or a decreased amount of or no Tead1 RNA or protein in comparison to unmodified myoblasts under conditions suitable to produce muscle fibres.

[0037] Muscle fibres and/or meat produced by the in vitro method of the invention form a further aspect of the invention.

[0038] In another aspect, the invention provides a method for determining the risk of developing skeletal muscle atrophy (e.g. sarcopenia) in a subject comprising determining the genotype of the subject at the cis-eQTL rs74360724, wherein when the subject is heterozygous or homozygous for the G allele they have an increased risk of developing muscle atrophy (e.g. sarcopenia) compared to a subject that is homozygous for the A allele, and/or at the cis-eQTL rs79200838, wherein when the subject is heterozygous or homozygous for the T allele they have an decreased risk of developing muscle atrophy (e.g. sarcopenia) compared to a subject that is homozygous for the C allele.

[0039] In a further aspect, the invention provides a method for predicting the performance of a subject in an activity associated with fast-twitch muscle (e.g. an athlete, e.g. a sprinter) comprising determining the genotype of the subject at the cis-eQTL rs74360724, wherein when the subject is heterozygous or homozygous for the A allele they have an increased likelihood of outperforming a subject that is homozygous for the G allele, and/or at the cis-eQTL rs79200838, wherein when the subject is heterozygous or homozygous for the C allele they have an decreased of outperforming a subject that is homozygous for the T allele.

[0040] In another aspect, the invention provides a method for predicting the capability of a subject to produce fast-twitch muscle comprising determining the genotype of the subject at the cis-eQTL rs74360724, wherein when the subject is heterozygous or homozygous for the A allele they have an increased capability of producing fast-twitch muscle compared a subject that is homozygous for the G allele, and/or at the cis-eQTL rs79200838, wherein when the subject is heterozygous or homozygous for the C allele they have an decreased capability of producing fast-twitch muscle compared a subject that is homozygous for the T allele.

### DETAILED DESCRIPTION

[0041] The terms “Cytor” and “Cytor RNA” are used interchangeably herein and refer to a long non-coding RNA comprising a nucleotide sequence as set forth in any one of SEQ ID NOs: 1-15 or an orthologue or naturally-occurring variant thereof. Human Cytor is also known as “Cytoskeleton Regulator RNA”, “Long Intergenic Non-Protein Coding RNA 152”, “LINC00152”, “Chromosome 2 Open Reading Frame 59” and “Non-Protein Coding RNA 152”. Mouse Cytor is also known as “myeloid RNA regulator of BCL2L11 induced cell death” or “Morrbid”.

[0042] Notably, naturally-occurring splice variants of Cytor have been observed in human and mouse. SEQ ID NOs: 1-6 represent known common variants of human Cytor. Notably, the Ensembl database indicates that there may be at least 38 different isoforms of human Cytor. The most abundant human Cytor variant is thought to have the sequence set forth in SEQ ID NO: 1.

[0043] SEQ ID NOs: 7-12 represent known variants of mouse Cytor. Again, the Ensembl database indicates that there may be at least 50 different isoforms of mouse Cytor. The most abundant mouse Cytor variants are thought to have the sequences set forth in SEQ ID NOs: 7-12, particularly SEQ ID NOs: 7-9.

[0044] SEQ ID NOs: 1-12 relate to sequences deposited under the following NCBI or Ensembl accession numbers: NR_024206.2, NR_024204.2, NR_024205.3, NR_146460.1, NR_146461.1, ENST00000331944.10, NR_028589.1, NR_028590.1, NR_028591.1, ENSMUST00000135433.8, ENSMUST00000138486.2 and ENSMUST00000151427.2, respectively. Orthologues of the human and mouse sequences (i.e. structurally related RNAs from other species with the same function as human Cytor) have been identified in other animals, including sheep, pigs and horses, as set forth in SEQ ID NOs: 13-15, respectively. The skilled person readily could determine whether an RNA from another animal is an orthologue of the recited sequences using techniques well-known in the art.

[0045] The genomic sequence of human Cytor is provided set forth in SEQ ID NOs: 16 and 17, which represent the NCBI and Ensembl deposited sequences, respectively. The genomic sequence of mouse Cytor is provided set forth in SEQ ID NOs: 18 and 19, which represent the NCBI and Ensembl deposited sequences, respectively.

[0046] The cDNA sequences corresponding to SEQ ID NOs: 1-15 are provided as SEQ ID NOs: 20-34, respectively.

[0047] The term “Tead1” commonly designates “Tead 1 RNA” and “Tead 1 protein”. The Tead 1 protein designates TEA domain family member 1, which is also known as Transcriptional enhancer factor TEF-1 and transcription factor 13 (TCF-13) The Tead 1 protein is encoded by the TEAD1 gene. The Tead 1 RNA is the mRNA encoding the Ted1 protein.

[0048] The amino acid sequence of the Tead 1 protein is preferably as set forth in any one of SEQ ID NOs 43 to 46—or an orthologue or naturally-occurring variant thereof. Similarly, the nucleotide sequence of the Tead 1 cDNA is preferably as set forth in any one of SEQ ID NOs: 39 to 42—or an orthologue or naturally-occurring variant thereof. The Tead 1 mRNA is preferably as set forth in any one of SEQ ID NOs: 39 to 42, herein T is replaced by U. SEQ ID NOs 39/43, 40/44, 41/45 and 42/46 are from human, horse, mouse and pig, respectively.

[0049] The terms “Cytor agonist” or “Cytor RNA agonist” are used interchangeably herein and refer to agents capable of directly or indirectly increasing (promoting, enhancing or potentiating) the expression, activity or function of Cytor, e.g. increasing the amount of Cytor RNA in skeletal muscle.

[0050] The term “Tead1 antagonists” as used herein encompasses “Tead1 RNA antagonists” as well as “Tead1 protein antagonists” and refers to agents capable of directly or indirectly decreasing (limiting, reducing or diminishing) or abolishing the expression, activity or function of Tead1, e.g. decreasing the amount of Tead1 RNA and/or Tead1 protein in skeletal muscle.

[0051] Thus, in some embodiments, a Cytor agonist may be viewed as an agent that increases the amount of Cytor RNA and a Tead1 antagonist may be viewed as an agent that decreases the amount of Tead1 RNA and/or protein in skeletal muscle (e.g. in myoblasts in skeletal muscle). It will be evident that such agonists selectively increase the expression, activity or function of Cytor, e.g. selectively increase the amount of Cytor RNA in skeletal muscle. Similarly, such antagonists selectively decrease the expression, protein level, activity or function of Tead 1, e.g. selectively decrease the amount of Tead1 RNA and/or protein in skeletal muscle. Alternatively viewed, agents that result in a global increase in expression that indirectly result in an increase in Cytor expression, function or expression are not Cytor agonists according to the invention. Likewise, agents that result in a global decrease in expression or protein that indirectly result in a decrease in Tead1 expression, protein level, function or expression are not Tead1 antagonists according to the invention. However, it will be evident to the skilled person that an increase in Cytor expression, function or activity and/or a decrease in the Tead1 expression, protein level, activity or function of Tead1 will have downstream effects on the expression of other genes, e.g. myosin encoding genes. Thus, a Cytor agonist may result in an increase in the expression of Cytor and one or more other genes and/or a Tead1 agonist may result in a decrease in the expression of Tead1 and one or more other genes. For instance, a Cytor agonist that functions directly may interact directly with Cytor RNA to increase (promote, enhance or potentiate) the activity or function of Cytor. Whilst the mechanism of Cytor action has not been elucidated, it is thought that it may interact with various transcriptional regulators and factors associated with chromatin assembly and packaging. Accordingly, Cytor may interact directly with one or more target proteins and/or non-coding RNAs, e.g. microRNAs. Thus, a Cytor agonist may function by increasing (promoting, enhancing or potentiating) the interaction between Cytor and one or more of its target molecules, e.g. one or more proteins and/or non-coding RNAs.

[0052] As a Cytor agonist may be viewed as an agent that increases the amount of Cytor RNA in skeletal muscle, in some embodiments the Cytor agonist may be Cytor RNA or an orthologue thereof or a functionally equivalent fragment and/or variant of said Cytor RNA or orthologue. In other words, a Cytor agonist may be a Cytor RNA administered to a subject in a sufficient amount (e.g. an effective amount) to increase the amount of Cytor RNA in skeletal muscle, e.g. compared to the amount of Cytor RNA in skeletal muscle prior to administration of the agonist.

[0053] Where the Cytor agonist is Cytor RNA, it may be preferred that an RNA molecule having the nucleotide sequence of the endogenous RNA is used, i.e. where the subject to be treated is human, a human Cytor RNA or functionally equivalent variant thereof is used (e.g. an endogenous variant, such as a splice variant). However, as shown in the Examples, human Cytor RNA has been shown to promote myogenesis in non-human species. Thus, in some embodiments, the Cytor RNA may have a nucleotide sequence from a different species or may be a synthetic Cytor RNA, e.g. a non-naturally occurring variant or fragment of a Cytor RNA.

[0054] In some embodiments, the Cytor agonist comprises RNA comprising a nucleotide sequence as set forth in any one of SEQ ID NOs:1-15 (e.g. any one of SEQ ID NOs: 1-6, preferably SEQ ID NO: 1 or 6) or a nucleotide sequence with at least 80% sequence identity to a sequence as set forth in any one of SEQ ID NOs: 1-15 (e.g. any one of SEQ ID NOs: 1-6, preferably SEQ ID NO: 1 or 6) or a functional portion (fragment) of any of said sequences, wherein the RNA is functionally equivalent to one or more of the recited sequences (e.g. a RNA with a nucleotide sequence of one of SEQ ID NOs: 1-6, preferably SEQ ID NO: 1 or 6) as defined below, e.g. promotes myogenesis in skeletal muscle.

[0055] Preferably, the nucleic acid molecule above is at least 85, 90, 95, 96, 97, 98, 99 or 100% identical to the sequence to which it is compared.

[0056] Nucleic acid sequence identity may be determined by, e.g. FASTA Search using GCG packages, with default values and a variable pamfactor, and gap creation penalty set at 12.0 and gap extension penalty set at 4.0 with a window of 6 nucleotides. Preferably said comparison is made over the full length of the sequence, but may be made over a smaller window of comparison, e.g. less than 300, 200, 100 or 50 contiguous nucleotides.

[0057] The Cytor RNA may be administered using any suitable means known in the art, as discussed in more detail below. In some embodiments, the RNA is provided in a nanoparticle. Thus, in some embodiments, the Cytor agonist may be viewed as an agent that increases the amount of Cytor RNA in skeletal muscle, wherein the agent is a nanoparticle comprising Cytor RNA. Any suitable nanoparticle may be used. In some embodiments, the nanoparticle is a lipid-based nanoparticle, e.g. a liposome, such as an immunoliposome. The nanoparticle comprising the Cytor RNA may be provided in a pharmaceutical composition as defined further below.

[0058] A Cytor agonist that functions indirectly may interact indirectly with Cytor RNA to selectively increase (promote, enhance or potentiate) the activity or function of Cytor. For instance, a Cytor agonist may interact directly with one or more of Cytor's target molecules, e.g. proteins and/or non-coding RNAs, e.g. microRNAs, such that an increase in Cytor activity is observed. Thus, a Cytor agonist may function indirectly by increasing (promoting, enhancing or potentiating) the interaction between Cytor and one or more of its target molecules, e.g. one or more proteins and/or non-coding RNAs.

[0059] As a Cytor agonist may be viewed as an agent that increases the amount of Cytor RNA in skeletal muscle, in some embodiments the Cytor agonist may function by inducing expression of Cytor RNA in skeletal muscle. For instance, a Cytor agonist may interact with one or more transcriptional regulators involved in controlling the expression of Cytor, e.g. one or more transcriptional regulators (e.g. a protein, such as a transcription factor), that interact with the Cytor promoter or an enhancer (or the transcriptional complex bound to the Cytor promoter or an enhancer) to selectively increase the amount of Cytor RNA in skeletal muscle. It will be evident that a Cytor agonist may function by inhibiting (e.g. reducing or blocking) the activity or function of a transcriptional regulator that suppresses Cytor expression. Alternatively, a Cytor agonist may function by increasing (e.g. promoting, enhancing or potentiating) the function of a transcriptional regulator that induces Cytor expression.

[0060] In some embodiments, the Cytor agonist may be an agent that selectively induces endogenous Cytor expression by interacting with the Cytor promoter or an enhancer (or the transcriptional complex bound to the Cytor promoter or an enhancer) directly. For instance, the Cytor agonist may comprise a polypeptide comprising a domain that binds to the Cytor promoter that is operably linked to a domain comprising a transcriptional activator.

[0061] In a representative example, the domain that binds to the Cytor promoter may be a CRISPR associated protein (e.g. a nuclease-deficient CRISPR associated protein, e.g. spdCas9 or sadCas9). Accordingly, the Cytor agonist (i.e. agent that increases or induces Cytor expression in skeletal muscle) may further comprise a guide RNA capable of hydridising with the Cytor promoter nucleic acid.

[0062] The skilled person readily could design a suitable guide RNA based on the known sequence of the Cytor promoter and well-established guidance in the art for designing such molecules. However, in a representative embodiment, a guide RNA may comprise or consist of a nucleotide sequence as set forth in SEQ ID NO: 35 or 36. In some embodiments, the guide RNA may comprise additional sequences, such as a capture sequence that binds to a trans-enhancer nucleic acid molecule.

[0063] Any suitable domain comprising a transcriptional activator may be used and the skilled person could select an appropriate domain based on known polypeptides with the required activity. In a representative example, a domain comprising a transcriptional activator may be derived from VP64, MS2, P65 or HSF1.

[0064] The skilled person readily would understand that the polypeptide defined above may be provided by administering one or more nucleic acid molecules encoding the polypeptide and optionally the guide RNA (and any other necessary nucleic acid molecule(s), e.g. a trans-enhancer nucleic acid), that is/are expressed in a cell (e.g. a myoblast cell), i.e. transcribed and/or translated in the cell.

[0065] Means for administering nucleic acid molecules are known in the art and any suitable means could be used to administer the nucleic acid molecules described herein. For instance, the nucleic acid molecules may be administered in the form of a nanoparticle. In some embodiments, the nanoparticle is a lipid-based nanoparticle, e.g. a liposome, such as an immunoliposome. In some embodiments, the nanoparticle may be a viral nanoparticle. Thus, in some embodiments, the Cytor agonist may be viewed as an agent that selectively increases the amount of Cytor RNA in skeletal muscle, wherein the agent is a viral nanoparticle or viral vector comprising a nucleic acid molecule Cytor agonist (e.g. that induces the expression of endogenous RNA). The nanoparticle comprising the nucleic acid molecule Cytor agonist may be provided in a pharmaceutical composition as defined further below.

[0066] Thus, viewed more generally, in some embodiments the Cytor agonist or agent that selectively increases or induces Cytor RNA in skeletal muscle comprises a gene therapy, i.e. the administration of one or more nucleic acid molecules that function to selectively increase the amount of Cytor RNA in skeletal muscle.

[0067] It will be evident the numerous gene therapy strategies may be employed to increase or induce Cytor RNA in skeletal muscle using techniques that are known in the art. In some embodiments, the gene therapy may involve the integration of nucleic acid molecules into the genome of one or more cells, e.g. myoblast cells, or a modification (e.g. substitution of one or more nucleotides, such as substitution of the G nucleotide with the A nucleotide at the cis-eQTL rs74360724 or such as substitution of the T nucleotide with the C nucleotide at the cis-eQTL rs such as substitution of the G nucleotide with the A nucleotide at the cis-eQTL rs74360724) of the genome of said cells to effect a permanent change in Cytor expression. In some embodiments, the gene therapy may involve the administration of nucleic acid molecules that do not integrate into the genome of cells and result only in a transient change in the amount of Cytor RNA, e.g. a transient change in endogenous Cytor expression.

[0068] In some embodiments, the gene therapy may involve the administration of a nucleic acid molecule encoding Cytor RNA or an orthologue thereof or a functionally equivalent fragment or variant of said Cytor RNA or orthologue. The nucleic acid molecule may be transcribed by cells in the skeletal muscle (e.g. myoblasts) thereby resulting in an increase of Cytor RNA in the skeletal muscle.

[0069] Thus, in some embodiments, the Cytor agonist comprises a nucleic acid molecule (e.g. DNA) encoding Cytor RNA comprising a nucleotide sequence as set forth in any one of SEQ ID NOs:1-15 (e.g. any one of SEQ ID NOs: 1-6, preferably SEQ ID NO: 1 or 6) or a nucleotide sequence with at least 80% sequence identity to a sequence as set forth in any one of SEQ ID NOs: 1-15 (e.g. any one of SEQ ID NOs: 1-6, preferably SEQ ID NO: 1 or 6) or a functional portion (fragment) of any of said sequences, wherein the RNA is functionally equivalent to one or more of the recited sequences (e.g. a RNA with a nucleotide sequence of one of SEQ ID NOs: 1-6, preferably SEQ ID NO: 1 or 6) as defined below, e.g. promotes myogenesis in skeletal muscle.

[0070] Alternatively viewed, in some embodiments, the Cytor agonist comprises a nucleic acid molecule (e.g. DNA) encoding Cytor RNA, wherein the nucleic acid molecule comprises a nucleotide sequence as set forth in any one of SEQ ID NOs:20-34 (e.g. any one of SEQ ID NOs: 20-25, preferably SEQ ID NO: 20 or 25) or a nucleotide sequence with at least 80% sequence identity to a sequence as set forth in any one of SEQ ID NOs: 20-34 (e.g. any one of SEQ ID NOs: 20-25, preferably SEQ ID NO: 20 or 25) or a functional portion (fragment) or complement of any of said sequences, wherein the RNA encoded by the nucleic acid molecule is functionally equivalent to one or more of an RNA comprising a sequence as set forth in any one of SEQ ID NOs: 1-15 (e.g. a RNA with a nucleotide sequence of one of SEQ ID NOs: 1-6, preferably SEQ ID NO: 1 or 6) as defined below, e.g. promotes myogenesis in skeletal muscle.

[0071] Preferably, the nucleic acid molecule above is at least 85, 90, 95, 96, 97, 98, 99 or 100% identical to the sequence to which it is compared. Nucleic acid sequence identity may be determined as defined above.

[0072] In some embodiments, the gene therapy may involve the administration of a nucleic acid molecule encoding a polypeptide that functions to increase the amount of Cytor RNA in skeletal muscle. As noted above, the polypeptide may be a synthetic polypeptide (e.g. fusion protein) that interacts with the Cytor promoter to induce Cytor expression. However, the nucleic acid molecule may encode a polypeptide that functions as a Cytor agonist as described above, e.g. that interacts with one or more of Cytor's target molecule or that interacts with one or more transcriptional regulators of Cytor expression. In a further representative embodiment, the nucleic acid molecule may encode a polypeptide that inhibits the degradation of endogenous Cytor, e.g. an RNA binding protein.

[0073] In some embodiments, the nucleic acid molecule(s) encoding the polypeptide may be provided as RNA, such that it can be translated to provide the polypeptide directly.

[0074] In some embodiments, the nucleic acid molecule(s) encoding the polypeptide or Cytor RNA may be provided in a form that requires processing by the cell to produce the polypeptide or Cytor RNA, e.g. the nucleic acid molecule(s) may be DNA. Suitably, the nucleic acid molecule(s) may comprise a control or regulatory sequence (e.g. promoter sequence) suitable for transcription of the encoding sequence in muscle, e.g. skeletal muscle. Thus, the nucleic acid molecule(s) encoding the polypeptide or Cytor RNA may be operably linked to a regulatory sequence. In some embodiments, the regulatory sequence is tissue-specific promoter, e.g. a muscle-specific promoter, such as a promoter that functions only in skeletal muscle, e.g. a myoblast-specific promoter. A suitable promoter may be the muscle creatine kinase (MCK) promoter or a variant thereof, e.g. a sequence deposited under Genbank AF188002.1 or functional variant or fragment thereof. Thus, in some embodiments, the regulatory sequence (promoter) comprises a nucleotide sequence as set forth in SEQ ID NO: 37 or a nucleotide sequence with at least 80% sequence identity to a sequence as set forth in SEQ ID NO: 37 or a functional portion (fragment) or complement of any of said sequences, wherein the sequence functions to enable expression of the nucleic acid molecule in muscle tissue (i.e. to limit expression of the nucleic acid molecule to muscle tissue).

[0075] A Tead1 antagonist may be viewed as an agent that decreases the amount of Tead1 RNA and/or protein in skeletal muscle. For instance, a Tead1 antagonist that functions directly may interact directly with Tead1 RNA and/or protein to decrease (inhibit, reduce or silence) the activity or function of Tead1 RNA and/or Tead1 protein.

[0076] In accordance with a preferred embodiment the antagonist inhibits the expression and/or the activity of Tead1.

[0077] A compound inhibiting the expression of Tead1 is in accordance with the present invention a compound lowering or preventing the transcription of the gene encoding the Tead1 and/or inhibiting the translation of the Tead1 mRNA into the Tead1 protein. Such compounds include compounds interfering with the transcriptional machinery and/or its interaction with the promoter of said gene and/or with expression control elements remote from the promoter such as enhancers. Such compounds also include compounds interfering with the translational machinery. The compound inhibiting the expression of Tead1 specifically inhibits the expression of Tead1, for example, by specifically interfering with the promoter region controlling the expression of Tead1. Preferably, the transcription and/or translation of Tead1 is reduced by at least 50%, more preferred at least 75% such as at least 90% or 95%, even more preferred at least 98% and most preferred by about 100% (e.g., as compared to the same experimental set up in the absence of the agent). Examples of such compounds are compounds selected from a small molecule, an aptamer, a siRNA, a shRNA, a miRNA, a ribozyme, an antisense nucleic acid molecule, a CRISPR-Cas9-based construct, a CRISPR-Cpf1-based construct, a meganuclease, a zinc finger nuclease, and a transcription activator-like (TAL) effector (TALE) nuclease

[0078] A compound inhibiting the activity of Tead1 in accordance with the present invention causes the Tead1 protein to perform its function with lowered efficiency. The compound inhibiting the activity of Tead1 protein specifically inhibits the activity of said protein. Preferably, the activity of the Tead1 protein is reduced by at least 50%, more preferred at least 75% such as at least 90% or 95%, even more preferred at least 98%, and most preferably about 100% (e.g., as compared to the same experimental set up in the absence of the compound). Tead1 is a transcription factor comprising a DNA binding domain called the TEA domain. The decrease in Tead1 activity is preferably a decrease of the TEA domain to bind their target DNA sites. Means and methods for determining the reduction of activity of a protein are established in the art. Examples of such compounds are compounds are an antibody, an antibody mimetic and an aptamer, wherein the antibody mimetic is preferably selected from affibodies, adnectins, anticalins, DARPins, avimers, nanofitins, affilins, Kunitz domain peptides, Fynomers, trispecific binding molecules and probodies.

[0079] In accordance with another preferred embodiment, the Tead1 antagonist is a small molecule, a nucleotide-based inhibitor or an amino acid-based inhibitor.

[0080] In accordance with a more preferred embodiment the nucleotide-based inhibitor is an aptamer, a ribozyme, a siRNA, a shRNA or an antisense oligonucleotide and the amino acid-based inhibitor is an antibody or an antibody mimetic.

[0081] The “small molecule” as used in this preferred embodiment is preferably an organic molecule. Organic molecules relate or belong to the class of chemical compounds having a carbon basis, the carbon atoms linked together by carbon-carbon bonds. The original definition of the term organic related to the source of chemical compounds, with organic compounds being those carbon-containing compounds obtained from plant or animal or microbial sources, whereas inorganic compounds were obtained from mineral sources. Organic compounds can be natural or synthetic. The organic molecule is preferably an aromatic molecule and more preferably a heteroaromatic molecule. In organic chemistry, the term aromaticity is used to describe a cyclic (ring-shaped), planar (flat) molecule with a ring of resonance bonds that exhibits more stability than other geometric or connective arrangements with the same set of atoms. Aromatic molecules are very stable, and do not break apart easily to react with other substances. In a heteroaromatic molecule at least one of the atoms in the aromatic ring is an atom other than carbon, e.g. N, S, or O. For all above-described organic molecules the molecular weight is preferably in the range of 200 Da to 1500 Da and more preferably in the range of 300 Da to 1000 Da.

[0082] The small molecule is preferably a proteolysis targeting chimera (PROTAC)-A PROTAC is a heterobifunctional small molecule composed of two active domains and a linker, capable of removing specific unwanted proteins. Rather than acting as a conventional enzyme inhibitor, a PROTAC works by inducing selective intracellular proteolysis. PROTACs consist of two covalently linked protein-binding molecules: one capable of engaging an E3 ubiquitin ligase, and another that binds to a target protein meant for degradation. Recruitment of the E3 ligase to the target protein results in ubiquitination and subsequent degradation of the target protein via the proteasome. Because PROTACs need only to bind their targets with high selectivity (rather than inhibit the target protein's enzymatic activity), previously ineffective inhibitor molecules that only provide for selective binding but no or insufficient inhibition may be further used in order to develop PROTACs.

[0083] Alternatively, the “small molecule” may be an inorganic compound. Inorganic compounds are derived from mineral sources and include all compounds without carbon atoms (except carbon dioxide, carbon monoxide and carbonates). Preferably, the small molecule has a molecular weight of less than about 2000 Da, or less than about 1000 Da such as less than about 500 Da, and even more preferably less than about Da amu. The size of a small molecule can be determined by methods well-known in the art, e.g., mass spectrometry. The small molecules may be designed, for example, based on the crystal structure of the target molecule, where sites presumably responsible for the biological activity can be identified and verified in in vivo assays such as in vivo high-throughput screening (HTS) assays.

[0084] A nucleotide-based inhibitor comprises or consists of a nucleic acid sequence. The nucleic acid is preferably complementary to a nucleic acid sequence of at least 12 contiguous nucleotides of one or more of SEQ ID NOs 39 to 42. The nucleotide-based inhibitor may comprise or consist of RNA, DNA or both. The nucleotide-based inhibitor of the invention is a molecule that binds specifically to Tead1 RNA. As used herein specific binding means that the inhibitor specifically targets the Tead1 mRNA and does substantially not exert any off target inhibitory effects, in particular on other cellular nucleic acid molecules.

[0085] An amino acid-based inhibitor comprises or consists of an amino acid sequence and preferably an amino acid sequence of at least 25, more preferably at least 50 amino acids. The amino acid-based inhibitor of the invention is a molecule that binds specifically to the Tead1 protein and in addition inhibits the activity of Tead1. The amino acid-based inhibitor preferably comprises natural amino acids but may also comprise unnatural amino acids. The amino acid-based inhibitor is preferably selected or designed such that it specifically binds to an amino acid sequence selected from one or more of SEQ ID NOs 43 to 46.

[0086] The term “antibody” as used in accordance with the present invention comprises, for example, polyclonal or monoclonal antibodies. Furthermore, also derivatives or fragments thereof, which still retain the binding specificity to the target, e.g. Tead1, are comprised in the term “antibody”. Antibody fragments or derivatives comprise, inter alia, Fab or Fab′ fragments, Fd, F(ab′)2, Fv or scFv fragments, single domain VH or V-like domains, such as VhH or V-NAR-domains, as well as multimeric formats such as minibodies, diabodies, tribodies or triplebodies, tetrabodies or chemically conjugated Fab′-multimers (see, for example, Harlow and Lane “Antibodies, A Laboratory Manual”, Cold Spring Harbor Laboratory Press, 198; Harlow and Lane “Using Antibodies: A Laboratory Manual” Cold Spring Harbor Laboratory Press, 1999; Altshuler E P, Serebryanaya D V, Katrukha A G. 2010, Biochemistry (Mosc)., vol. 75(13), 1584; Holliger P, Hudson P J. 2005, Nat Biotechnol., vol. 23(9), 1126). The multimeric formats in particular comprise bispecific antibodies that can simultaneously bind to two different types of antigen. The first antigen can be found on the protein of the invention. The second antigen may, for example, be a tumor marker that is specifically expressed on cancer cells or a certain type of cancer cells. Non-limiting examples of bispecific antibodies formats are Biclonics (bispecific, full length human IgG antibodies), DART (Dual-affinity Re-targeting Antibody) and BiTE (consisting of two single-chain variable fragments (scFvs) of different antibodies) molecules (Kontermann and Brinkmann (2015), Drug Discovery Today, 20(7):838-847).

[0087] The term “antibody” also includes embodiments such as chimeric (human constant domain, non-human variable domain), single chain and humanised (human antibody with the exception of non-human CDRs) antibodies.

[0088] Various techniques for the production of antibodies are well known in the art and described, e.g. in Harlow and Lane (1988) and (1999) and Altshuler et al., 2010, loc. cit. Thus, polyclonal antibodies can be obtained from the blood of an animal following immunisation with an antigen in mixture with additives and adjuvants and monoclonal antibodies can be produced by any technique which provides antibodies produced by continuous cell line cultures. Examples for such techniques are described, e.g. in Harlow E and Lane D, Cold Spring Harbor Laboratory Press, 1988; Harlow E and Lane D, Using Antibodies: A Laboratory Manual, Cold Spring Harbor Laboratory Press, 1999 and include the hybridoma technique originally described by Köhler and Milstein, 1975, the trioma technique, the human B-cell hybridoma technique (see e.g. Kozbor D, 1983, Immunology Today, vol. 4, 7; Li J, et al. 2006, PNAS, vol. 103(10), 3557) and the EBV-hybridoma technique to produce human monoclonal antibodies (Cole et al., 1985, Alan R. Liss, Inc, 77-96). Furthermore, recombinant antibodies may be obtained from monoclonal antibodies or can be prepared de novo using various display methods such as phage, ribosomal, mRNA, or cell display. A suitable system for the expression of the recombinant (humanised) antibodies may be selected from, for example, bacteria, yeast, insects, mammalian cell lines or transgenic animals or plants (see, e.g., U.S. Pat. No. 6,080,560; Holliger P, Hudson P J. 2005, Nat Biotechnol., vol. 23(9), 11265). Further, techniques described for the production of single chain antibodies (see, inter alia, U.S. Pat. No. 4,946,778) can be adapted to produce single chain antibodies specific for an epitope of Tead1. Surface plasmon resonance as employed in the BIAcore system can be used to increase the efficiency of phage antibodies.

[0089] As used herein, the term “antibody mimetics” refers to compounds which, like antibodies, can specifically bind antigens, such as Tead1, but which are not structurally related to antibodies. Antibody mimetics are usually artificial peptides or proteins with a molar mass of about 3 to 20 kDa. For example, an antibody mimetic may be selected from the group consisting of affibodies, adnectins, anticalins, DARPins, avimers, nanofitins, affilins, Kunitz domain peptides, Fynomers, trispecific binding molecules and prododies. These polypeptides are well known in the art and are described in further detail herein below.

[0090] The term “affibody”, as used herein, refers to a family of antibody mimetics which is derived from the Z-domain of staphylococcal protein A. Structurally, affibody molecules are based on a three-helix bundle domain which can also be incorporated into fusion proteins. In itself, an affibody has a molecular mass of around 6 kDa and is stable at high temperatures and under acidic or alkaline conditions. Target specificity is obtained by randomisation of 13 amino acids located in two alpha-helices involved in the binding activity of the parent protein domain (Feldwisch J, Tolmachev V.; (2012) Methods Mol Biol. 899:103-26).

[0091] The term “adnectin” (also referred to as “monobody”), as used herein, relates to a molecule based on the 10th extracellular domain of human fibronectin III (10Fn3), which adopts an Ig-like β-sandwich fold of 94 residues with 2 to 3 exposed loops, but lacks the central disulphide bridge (Gebauer and Skerra (2009) Curr Opinion in Chemical Biology 13:245-255). Adnectins with the desired target specificity, i.e. against Tead1, can be genetically engineered by introducing modifications in specific loops of the protein.

[0092] The term “anticalin”, as used herein, refers to an engineered protein derived from a lipocalin (Beste G, Schmidt F S, Stibora T, Skerra A. (1999) Proc Natl Acad Sci USA. 96(5):1898-903; Gebauer and Skerra (2009) Curr Opinion in Chemical Biology 13:245-255). Anticalins possess an eight-stranded β-barrel which forms a highly conserved core unit among the lipocalins and naturally forms binding sites for ligands by means of four structurally variable loops at the open end. Anticalins, although not homologous to the IgG superfamily, show features that so far have been considered typical for the binding sites of antibodies: (i) high structural plasticity as a consequence of sequence variation and (ii) elevated conformational flexibility, allowing induced fit to targets with differing shape.

[0093] As used herein, the term “DARPin” refers to a designed ankyrin repeat domain (166 residues), which provides a rigid interface arising from typically three repeated β-turns. DARPins usually carry three repeats corresponding to an artificial consensus sequence, wherein six positions per repeat are randomised. Consequently, DARPins lack structural flexibility (Gebauer and Skerra, 2009).

[0094] The term “avimer”, as used herein, refers to a class of antibody mimetics which consist of two or more peptide sequences of 30 to 35 amino acids each, which are derived from A-domains of various membrane receptors and which are connected by linker peptides. Binding of target molecules occurs via the A-domain and domains with the desired binding specificity, i.e. for Tead1, can be selected, for example, by phage display techniques. The binding specificity of the different A-domains contained in an avimer may, but does not have to be identical (Weidle U H, et al., (2013), Cancer Genomics Proteomics; 10(4):155-68).

[0095] A “nanofitin” (also known as affitin) is an antibody mimetic protein that is derived from the DNA binding protein Sac7d of Sulfolobus acidocaldarius. Nanofitins usually have a molecular weight of around 7 kDa and are designed to specifically bind a target molecule, such as e.g. Tead1, by randomising the amino acids on the binding surface (Mouratou B, Béhar G, Paillard-Laurance L, Colinet S, Pecorari F., (2012) Methods Mol Biol.; 805:315-31).

[0096] The term “affilin”, as used herein, refers to antibody mimetics that are developed by using either gamma-B crystalline or ubiquitin as a scaffold and modifying amino-acids on the surface of these proteins by random mutagenesis. Selection of affilins with the desired target specificity, i.e. against Tead1, is effected, for example, by phage display or ribosome display techniques. Depending on the scaffold, affilins have a molecular weight of approximately 10 or 20 kDa. As used herein, the term affilin also refers to di- or multimerised forms of affilins (Weidle U H, et al., (2013), Cancer Genomics Proteomics; 10(4):155-68).

[0097] A “Kunitz domain peptide” is derived from the Kunitz domain of a Kunitz-type protease inhibitor such as bovine pancreatic trypsin inhibitor (BPTI), amyloid precursor protein (APP) or tissue factor pathway inhibitor (TFPI). Kunitz domains have a molecular weight of approximately 6 kDA and domains with the required target specificity, i.e. against Tead1, can be selected by display techniques such as phage display (Weidle et al., (2013), Cancer Genomics Proteomics; 10(4):155-68).

[0098] As used herein, the term “Fynomer” refers to a non-immunoglobulin-derived binding polypeptide derived from the human Fyn SH3 domain. Fyn SH3-derived polypeptides are well-known in the art and have been described e.g. in Grabulovski et al. (2007) JBC, 282, p. 3196-3204, WO 2008/022759, Bertschinger et al (2007) Protein Eng Des Sel 20(2):57-68, Gebauer and Skerra (2009) Curr Opinion in Chemical Biology 13:245-255, or Schlatter et al. (2012), MAbs 4:4, 1-12).

[0099] The term “trispecific binding molecule” as used herein refers to a polypeptide molecule that possesses three binding domains and is thus capable of binding, preferably specifically binding to three different epitopes. At least one of these three epitopes is an epitope of the protein of the fourth aspect of the invention. The two other epitopes may also be epitopes of the protein of the fourth aspect of the invention or may be epitopes of one or two different antigens. The trispecific binding molecule is preferably a TriTac. A TriTac is a T-cell engager for solid tumors which comprised of three binding domains being designed to have an extended serum half-life and be about one-third the size of a monoclonal antibody.

[0100] As used herein, the term “probody” refers to a protease-activatable antibody prodrug. A probody consists of an authentic IgG heavy chain and a modified light chain. A masking peptide is fused to the light chain through a peptide linker that is cleavable by tumor-specific proteases. The masking peptide prevents the probody binding to healthy tissues, thereby minimizing toxic side effects.

[0101] Aptamers are nucleic acid molecules or peptide molecules that bind a specific target molecule. Aptamers are usually created by selecting them from a large random sequence pool, but natural aptamers also exist in riboswitches. Aptamers can be used for both basic research and clinical purposes as macromolecular drugs. Aptamers can be combined with ribozymes to self-cleave in the presence of their target molecule. These compound molecules have additional research, industrial and clinical applications (Osborne et. al. (1997), Current Opinion in Chemical Biology, 1:5-9; Stull & Szoka (1995), Pharmaceutical Research, 12, 4:465-483).

[0102] Nucleic acid aptamers are nucleic acid species that normally consist of (usually short) strands of oligonucleotides. Typically, they have been engineered through repeated rounds of in vitro selection or equivalently, SELEX (systematic evolution of ligands by exponential enrichment) to bind to various molecular targets such as small molecules, proteins, nucleic acids, and even cells, tissues and organisms.

[0103] Peptide aptamers are usually peptides or proteins that are designed to interfere with other protein interactions inside cells. They consist of a variable peptide loop attached at both ends to a protein scaffold. This double structural constraint greatly increases the binding affinity of the peptide aptamer to levels comparable to an antibody's (nanomolar range). The variable peptide loop typically comprises 10 to 20 amino acids, and the scaffold may be any protein having good solubility properties. Currently, the bacterial protein Thioredoxin-A is the most commonly used scaffold protein, the variable peptide loop being inserted within the redox-active site, which is a -Cys-Gly-Pro-Cys-loop (SEQ ID NO: 55) in the wild protein, the two cysteins lateral chains being able to form a disulfide bridge. Peptide aptamer selection can be made using different systems, but the most widely used is currently the yeast two-hybrid system.

[0104] Aptamers offer the utility for biotechnological and therapeutic applications as they offer molecular recognition properties that rival those of the commonly used biomolecules, in particular antibodies. In addition to their discriminatory recognition, aptamers offer advantages over antibodies as they can be engineered completely in a test tube, are readily produced by chemical synthesis, possess desirable storage properties, and elicit little or no immunogenicity in therapeutic applications. Non-modified aptamers are cleared rapidly from the bloodstream, with a half-life of minutes to hours, mainly due to nuclease degradation and clearance from the body by the kidneys, a result of the aptamers' inherently low molecular weight. Unmodified aptamer applications currently focus on treating transient conditions such as blood clotting, or treating organs such as the eye where local delivery is possible. This rapid clearance can be an advantage in applications such as in vivo diagnostic imaging. Several modifications, such as 2′-fluorine-substituted pyrimidines, polyethylene glycol (PEG) linkage, fusion to albumin or other half life extending proteins etc. are available to scientists such that the half-life of aptamers can be increased for several days or even weeks.

[0105] In accordance with the present invention, the term “small interfering RNA (siRNA)”, also known as short interfering RNA or silencing RNA, refers to a class of 18 to 30, preferably 19 to 25, most preferred 21 to 23 or even more preferably 21 nucleotide-long double-stranded RNA molecules that play a variety of roles in biology. Most notably, siRNA is involved in the RNA interference (RNAi) pathway where the siRNA interferes with the expression of a specific gene. In addition to their role in the RNAi pathway, siRNAs also act in RNAi-related pathways, e.g. as an antiviral mechanism or in shaping the chromatin structure of a genome.

[0106] siRNAs naturally found in nature have a well defined structure: a short double-strand of RNA (dsRNA) with 2-nt 3′ overhangs on either end. Each strand has a 5′ phosphate group and a 3′ hydroxyl (—OH) group. This structure is the result of processing by dicer, an enzyme that converts either long dsRNAs or small hairpin RNAs into siRNAs. siRNAs can also be exogenously (artificially) introduced into cells to bring about the specific knockdown of a gene of interest. Essentially any gene for which the sequence is known can thus be targeted based on sequence complementarity with an appropriately tailored siRNA. The double-stranded RNA molecule or a metabolic processing product thereof is capable of mediating target-specific nucleic acid modifications, particularly RNA interference and/or DNA methylation. Exogenously introduced siRNAs may be devoid of overhangs at their 3′ and 5′ ends, however, it is preferred that at least one RNA strand has a 5′- and/or 3′-overhang. Preferably, one end of the double-strand has a 3′-overhang from 1 to 5 nucleotides, more preferably from 1 to 3 nucleotides and most preferably 2 nucleotides. The other end may be blunt-ended or has up to 6 nucleotides 3′-overhang. In general, any RNA molecule suitable to act as siRNA is envisioned in the present invention. The most efficient silencing was so far obtained with siRNA duplexes composed of 21-nt sense and 21-nt antisense strands, paired in a manner to have a 2-nt 3′-overhang. The sequence of the 2-nt 3′ overhang makes a small contribution to the specificity of target recognition restricted to the unpaired nucleotide adjacent to the first base pair (Elbashir et al. 2001). 2′-deoxynucleotides in the 3′ overhangs are as efficient as ribonucleotides, but are often cheaper to synthesize and probably more nuclease resistant. Delivery of siRNA may be accomplished using any of the methods known in the art, for example by combining the siRNA with saline and administering the combination intravenously or intranasally or by formulating siRNA in glucose (such as for example 5% glucose) or cationic lipids and polymers can be used for siRNA delivery in vivo through systemic routes either intravenously (IV) or intraperitoneally (IP) (Fougerolles et al. (2008), Current Opinion in Pharmacology, 8:280-285; Lu et al. (2008), Methods in Molecular Biology, vol. 437: Drug Delivery Systems—Chapter 3: Delivering Small Interfering RNA for Novel Therapeutics).

[0107] A short hairpin RNA (shRNA) is a sequence of RNA that makes a tight hairpin turn that can be used to silence gene expression via RNA interference. shRNA uses a vector introduced into cells and utilizes the U6 promoter to ensure that the shRNA is always expressed. This vector is usually passed on to daughter cells, allowing the gene silencing to be inherited. The shRNA hairpin structure is cleaved by the cellular machinery into siRNA, which is then bound to the RNA-induced silencing complex (RISC). This complex binds to and cleaves mRNAs which match the siRNA that is bound to it. si/shRNAs to be used in the present invention are preferably chemically synthesized using appropriately protected ribonucleoside phosphoramidites and a conventional DNA/RNA synthesizer. Suppliers of RNA synthesis reagents are Proligo (Hamburg, Germany), Dharmacon Research (Lafayette, CO, USA), Pierce Chemical (part of Perbio Science, Rockford, IL, USA), Glen Research (Sterling, VA, USA), ChemGenes (Ashland, MA, USA), and Cruachem (Glasgow, UK). Most conveniently, siRNAs or shRNAs are obtained from commercial RNA oligo synthesis suppliers, which sell RNA-synthesis products of different quality and costs. In general, the RNAs applicable in the present invention are conventionally synthesized and are readily provided in a quality suitable for RNAi.

[0108] Further molecules effecting RNAi include, for example, microRNAs (miRNA). Said RNA species are single-stranded RNA molecules. Endogenously present miRNA molecules regulate gene expression by binding to a complementary mRNA transcript and triggering of the degradation of said mRNA transcript through a process similar to RNA interference. Accordingly, exogenous miRNA may be employed as an inhibitor of Tead1 after introduction into the respective cells.

[0109] In accordance with a further preferred embodiment the nucleotide based inhibitor comprises (a) a nucleic acid sequence which comprises or consists of a nucleic acid sequence being complementary to at least 12 continuous nucleotides of a nucleic acid sequence selected from SEQ ID NOs 39 to 42, (b) a nucleic acid sequence which comprises or consists of a nucleic acid sequence which is at least 70% identical to the complementary strand of one or more nucleic acid sequences selected from SEQ ID NOs 39 to 42, (c) a nucleic acid sequence which comprises or consists of a nucleic acid sequence according to (a) or (b), wherein the nucleic acid sequence is DNA or RNA, or (d) an expression vector expressing the nucleic acid sequence as defined in any one of (a) to (c), preferably under the control of a skeletal muscle-specific promoter.

[0110] The nucleic acid sequences as defined in items (a) to (c) of this preferred embodiment comprise or consist of sequences being complementary to nucleotides of Tead1 as defined by one or more of SEQ ID NOs 39 to 43. Hence, the nucleic acid sequences as defined in items (a) to (c) comprise or are antisense nucleic acid sequences.

[0111] The nucleic acid sequence according to item (a) of this further preferred embodiment of the invention comprises or consists of a sequence which is with increasing preference complementary to at least 13 nucleotides, at least 14 nucleotides, at least 15 nucleotides, at least 16 nucleotides, at least 17 nucleotides, at least 18 nucleotides, at least 19 nucleotides, at least 20 nucleotides, at least 21 nucleotides of one or more selected from SEQ ID NOs 39 to 42. The format of the nucleic acid sequence according to item (a) is not particularly limited as long as it comprises or consists of at least 12 continuous nucleotides being complementary to a nucleic acid sequence selected from SEQ ID NOs 39 to 42. The nucleic acid sequence according to item (a) comprises or consists of antisense an oligonucleotide. Hence, the nucleic acid sequence according to item (a) reflects the above-mentioned basic principle of the antisense technology which is the use of an oligonucleotide for silencing a selected target RNA through the exquisite specificity of complementary-based pairing. Therefore, it is to be understood that the nucleic acid sequence according to item (a) is preferably in the format of an siRNA, shRNA or an antisense oligonucleotide as defined herein above. The antisense oligonucleotides are preferably LNA-GapmeRs, AntagomiRs, or antimiRs.

[0112] The nucleic acid sequence according to item (b) requiring at least 70% identity to the complementary strand of one or more nucleic acid sequences selected from SEQ ID NOs 39 to is considerably longer than the nucleic acid sequence according to item (a) which comprises an antisense oligonucleotide and comprises at least 12 continuous nucleotides of a nucleic acid sequence selected from SEQ ID NOs 39 to. A nucleic acid sequence according to item (b) of the above preferred embodiment of the invention is capable of interacting with, more specifically hybridizing with the target Tead1 RNA. By formation of the hybrid the function of the translation of the Tead1 RNA is reduced or blocked.

[0113] The sequence identity of the molecule according to item (b) in connection with a sequence selected from SEQ ID NOs 39 to is with increasing preference at least 75%, at least 80%, at least 85%, at least 90%, at least 92.5%, at least 95%, at least 98%, at least 99% and 100%.

[0114] In the nucleic acid sequence according to item (c) the nucleotide sequences may be RNA or DNA. RNA or DNA encompasses chemically modified RNA nucleotides or DNA nucleotides. As commonly known RNA comprises the nucleotide U while DNA comprises the nucleotide T.

[0115] In accordance with items (d) and (e) of the above preferred embodiment the inhibitor may also be an expression vector, respectively being capable of expressing a nucleic acid sequence as defined in any one of items (a) to (c).

[0116] An expression vector may be a plasmid that is used to introduce a specific transcript into a target cell. Once the expression vector is inside the cell, the protein that is encoded by the gene is produced by the cellular-transcription and translation machinery ribosomal complexes. The plasmid is in general engineered to contain regulatory sequences that act as enhancer and/or promoter regions and lead to efficient transcription of the transcript. In accordance with the present invention the expression vector preferably contains a muscle-specific promoter, preferably skeletal muscle-specific promoter. Using such a promoter ensures that the nucleic acid sequence is only expressed in the (skeletal) muscle and may avoid potential unwanted side effects by expression in other organs. Such promoters are described, for example, in Skopenova (2021), Acta Naturae. 2021 January-March; 13(1): 47-58.

[0117] Non-limiting examples of expression vectors include prokaryotic plasmid vectors, such as the pUC-series, pBluescript (Stratagene), the pET-series of expression vectors (Novagen) or pCRTOPO (Invitrogen) and vectors compatible with an expression in mammalian cells like pREP (Invitrogen), pcDNA3 (Invitrogen), pCEP4 (Invitrogen), pMC1neo (Stratagene), pXT1 (Stratagene), pSG5 (Stratagene), EBO-pSV2neo, pBPV-1, pdBPVMMTneo, pRSVgpt, pRSVneo, pSV2-dhfr, plZD35, pLXIN, pSIR (Clontech), pIRES-EGFP (Clontech), pEAK-10 (Edge Biosystems) pTriEx-Hygro (Novagen) and pCINeo (Promega). Examples for plasmid vectors suitable for Pichia pastoris comprise e.g. the plasmids pAO815, pPIC9K and pPIC3.5K (all Intvitrogen). For the formulation of a pharmaceutical composition a suitable vector is selected in accordance with good manufacturing practice. Such vectors are known in the art, for example, from Ausubel et al, Hum Gene Ther. 2011 April; 22(4):489-97 or Allay et al., Hum Gene Ther. May 2011; 22(5): 595-604.

[0118] A typical mammalian expression vector contains the promoter element, which mediates the initiation of transcription of mRNA, the protein coding sequence, and signals required for the termination of transcription and polyadenylation of the transcript. Moreover, elements such as origin of replication, drug resistance gene, regulators (as part of an inducible promoter) may also be included. The lac promoter is a typical inducible promoter, useful for prokaryotic cells, which can be induced using the lactose analogue isopropylthiol-b-D-galactoside (“IPTG”). For recombinant expression and secretion, the polynucleotide of interest may be ligated between e.g. the PelB leader signal, which directs the recombinant protein in the periplasm and the gene III in a phagemid called pHEN4 (described in Ghahroudi et al, 1997, FEBS Letters 414:521-526). Additional elements might include enhancers, Kozak sequences and intervening sequences flanked by donor and acceptor sites for RNA splicing. Highly efficient transcription can be achieved with the early and late promoters from SV40, the long terminal repeats (LTRs) from retroviruses, e.g., RSV, HTLVI, HIVI, and the early promoter of the cytomegalovirus (CMV). However, cellular elements can also be used (e.g., the human actin promoter). Suitable expression vectors for use in practicing the present invention include, for example, vectors such as pSVL and pMSG (Pharmacia, Uppsala, Sweden), pRSVcat (ATCC 37152), pSV2dhfr (ATCC 37146) and pBC12MI (ATCC 67109). Alternatively, the recombinant (poly)peptide can be expressed in stable cell lines that contain the gene construct integrated into a chromosome. The co-transfection with a selectable marker such as dhfr, gpt, neomycin, hygromycin allows the identification and isolation of the transfected cells. The transfected nucleic acid can also be amplified to express large amounts of the encoded (poly)peptide. The DHFR (dihydrofolate reductase) marker is useful to develop cell lines that carry several hundred or even several thousand copies of the gene of interest. Another useful selection marker is the enzyme glutamine synthase (GS) (Murphy et al. 1991, Biochem J. 227:277-279; Bebbington et al. 1992, Bio/Technology 10:169-175). Using these markers, the mammalian cells are grown in selective medium and the cells with the highest resistance are selected. As indicated above, the expression vectors will preferably include at least one selectable marker. Such markers include dihydrofolate reductase, G418 or neomycin resistance for eukaryotic cell culture and tetracycline, kanamycin or ampicillin resistance genes for culturing in E. coli and other bacteria. For vector modification techniques, see Sambrook and Russel (2001), Molecular Cloning: A Laboratory Manual, 3 Vol. Generally, vectors can contain one or more origins of replication (ori) and inheritance systems for cloning or expression, one or more markers for selection in the host, e.g., antibiotic resistance, and one or more expression cassettes. Suitable origins of replication (ori) include, for example, the Col E1, the SV40 viral and the M 13 origins of replication.

[0119] The sequences to be inserted into the vector can e.g. be synthesized by standard methods, or isolated from natural sources. Ligation of the coding sequences to transcriptional regulatory elements and/or to other amino acid encoding sequences can be carried out using established methods. Transcriptional regulatory elements (parts of an expression cassette) ensuring expression in prokaryotes or eukaryotic cells are well known to those skilled in the art. These elements comprise regulatory sequences ensuring the initiation of the transcription (e.g., translation initiation codon, promoters, enhancers, and/or insulators), internal ribosomal entry sites (IRES) (Owens, Proc. Natl. Acad. Sci. USA 98 (2001), 1471-1476) and optionally poly-A signals ensuring termination of transcription and stabilization of the transcript. Additional regulatory elements may include transcriptional as well as translational enhancers, and/or naturally-associated or heterologous promoter regions. Preferably, the nucleotide sequence as defined in item (a) of the above preferred embodiment of the invention is operatively linked to such expression control sequences allowing expression in prokaryotic or eukaryotic cells.

[0120] The Tead 1 antagonist may be administered using any suitable means known in the art, as discussed in more detail below. In some embodiments, the nucleotide-based inhibitor is provided in a nanoparticle. Thus, in some embodiments, the nucleotide-based inhibitor may be viewed as an agent that decreases the amount of Cytor RNA in skeletal muscle, wherein the agent is a nanoparticle comprising a nucleotide-based inhibitor as defined. Any suitable nanoparticle may be used. In some embodiments, the nanoparticle is a lipid-based nanoparticle, e.g. a liposome, such as an immunoliposome. The nanoparticle comprising the nucleotide-based inhibitor may be provided in a pharmaceutical composition as defined further below.

[0121] A Tead1 antagonist that functions indirectly may interact indirectly with Tead1 RNA to selectively decrease (inhibit, reduce or silence) the activity or function of Tead1. For instance, a Tead1 antagonist agonist may interact directly with one or more of Tead1 's target molecules, e.g. proteins and/or non-coding RNAs, e.g. microRNAs, such that a decrease in Tead1 activity is observed. Thus, a Tead1 antagonist may function indirectly by decreasing (inhibiting, reducing or silencing) the interaction between Tead1 and one or more of its target molecules, noting that Tead1 is a transcription factor comprising DNA binding domain called the TEA domain. The decrease in Tead1 activity is preferably a decrease of the TEA domain to bind their target DNA sites. The decrease is with increasing preference at least 10%, at least 20%, at least 30%, at least 40%, at least 50%, at least 60%, at least 70%, at least 80%, at least 90%, at least 95% and most preferred essentially 100% as compared to the absence of the Tead1 antagonist.

[0122] Furthermore, a Tead1 antagonist may interact with one or more transcriptional regulators involved in controlling the expression of Tead1, e.g. one or more transcriptional regulators (e.g. a protein, such as a transcription factor), that interact with the Tead1 promoter or an enhancer (or the transcriptional complex bound to the Tead1 promoter or an enhancer) to selectively decrease the amount of Tead1 RNA or protein in skeletal muscle. It will be evident that a Tead1 antagonist may function by inhibiting (e.g. reducing or blocking) the activity or function of a transcriptional regulator that induces Ted1 expression. Alternatively, a Tead1 antagonist may function by increasing (e.g. promoting or enhancing) the function of a transcriptional regulator that reduces Tead1 expression.

[0123] In some embodiments, the Tead1 antagonist may be an agent that selectively reduces endogenous Tead1 expression by interacting with the Tead1 promoter or an enhancer (or the transcriptional complex bound to the Cytor promoter or an enhancer) directly. For instance, the Tead1 antagonist may comprise a polypeptide comprising a domain that binds to the Tead1 promoter that is operably linked to a domain comprising a transcriptional inhibitor.

[0124] In a representative example, the domain that binds to the Tead1 promoter or Tead1 gene may be a CRISPR associated protein (e.g. a CRISPR associated protein, e.g. Cas9 or Cpf1). Accordingly, the Tead1 antagonist (i.e. agent that decreases or prevents Tead1 expression in skeletal muscle) may further comprise a guide RNA capable of hydridising with the Tead1 promoter nucleic acid or the Tead1 gene.

[0125] The skilled person readily could design a suitable guide RNA based on the known sequence of the Tead1 promoter and gene as well as well-established guidance in the art for designing such molecules.

[0126] The skilled person readily would understand that the polypeptide defined above may be provided by administering one or more nucleic acid molecules encoding the polypeptide and optionally the guide RNA (and any other necessary nucleic acid molecule(s), e.g. a trans-enhancer nucleic acid), that is/are expressed in a cell (e.g. a myoblast cell), i.e. transcribed and/or translated in the cell.

[0127] In some embodiments the Tead1 antagonist or agent that selectively decreases or prevents Tead1 RNA and/or protein in skeletal muscle comprises a gene therapy, i.e. the administration of one or more nucleic acid molecules that function to selectively decrease the amount of Cytor RNA and/or protein in skeletal muscle.

[0128] It will be evident that numerous gene therapy strategies may be employed to decrease or prevent Tead1 RNA and/or protein in skeletal muscle using techniques that are known in the art. In some embodiments, the gene therapy may involve the administration of nucleic acid molecules that do not integrate into the genome of cells and result only in a transient change in the amount of Tead1 RNA and/or protein, e.g. a transient change in endogenous Tead1 expression.

[0129] As discussed above, it is possible to design Cytor agonists and/or Tead1 antagonists (e.g. nucleic acid molecules and/or polypeptides) based on known methods in the art as described above. However, the skilled person will understand that it is not necessary to understand the mechanism of action of a Cytor agonist or a Tead1 antagonist in order to work the invention. The skilled person readily could identify Cytor agonists and Tead1 antagonists suitable for use in the invention using routine experimentation based on techniques that are well-established in the art.

[0130] The Examples demonstrate that Cytor and Tead1 regulate myoblast differentiation into type II myotubes and show that an increase in Cytor RNA and/or a decrease in Tead1 RNA and/or protein in skeletal muscle results in an increase in both the size and number of type II myotubes. Accordingly, Cytor agonists and/or Tead1 antagonists may be identified and selected by screening agents that result in an increase in the amount of Cytor RNA and/or a decrease in the amount of Tead1 RNA or protein in myoblasts. Any suitable method may be used to screen agents that result in an increase in the amount of Cytor RNA and/or a decrease in the amount of Tead1 RNA or protein.

[0131] In a representative example, an in vitro method of identifying a Cytor agonist and/or a Tead1 antagonist may comprise:
[0132] (a) providing an agent or a plurality of agents that may function as a Cytor agonist and/or a Tead1 antagonist (e.g. a library of compounds, e.g. a drug screening library);
[0133] (b) contacting an agent from (a) with a myoblast cell (e.g. a plurality of myoblast cells);
[0134] (c) determining the amount of Cytor RNA and/or Tead1 RNA or protein in the myoblast cell(s);
[0135] (d) optionally repeating steps (b) and (c); and
[0136] (e) identifying an agent that results in an increase in Cytor RNA and/or a decrease in Tead1 RNA or protein in the myoblast cell(s) compared to control myoblast cells.

[0137] The method may further involve a step of verifying the activity of the agent by determining whether the agent is able to promote the differentiation of myoblasts into type II myotubes, e.g. to increase the size (e.g. area) and/or number of type II myotubes (e.g. relative to a suitable control). Any suitable method for verifying the activity of the agent may be used, e.g. based on the methods described in the Examples below.

[0138] In a further representative example an in vitro method of identifying a Cytor agonist and/or a Tead1 antagonist may comprise:
[0139] (a) providing an agent or a plurality of agents that may function as a Cytor agonist and/or a Tead1 antagonist (e.g. a library of compounds, e.g. a drug screening library);
[0140] (b) contacting an agent from (a) with a myoblast cell (e.g. a plurality of myoblast cells);
[0141] (c) measuring the size and/or number of type II myotubes after a suitable period of time (e.g. a period of time suitable for myoblast cells to differentiate into type II myotubes, e.g. following culture under conditions suitable for myoblast cells to differentiate into type II myotubes);
[0142] (d) optionally repeating steps (b) and (c); and
[0143] (e) identifying an agent that results in an increase in the size and/or number of type II myotubes compared to control myoblast cells.

[0144] The method may further involve a step of verifying the activity of the agent by determining whether the agent is able to increase the amount of Cytor RNA and/or to decrease the amount of Tead1 RNA or protein in myoblast cells relative to control myoblast cells. Any suitable method for verifying the activity of the agent may be used.

[0145] The term “agent” as used herein refers to a substance that induces a desired pharmacological and/or physiological effect. Suitably, an agent functions to increase, promote, enhance or potentiate the expression, activity or function of Cytor RNA in a myoblast, e.g. in skeletal muscle, e.g. functions to increase the amount of Cytor RNA in skeletal muscle. Also suitably, an agent functions to decrease, reduce, or prevent the expression, activity or function of Tead1 RNA and/or protein in a myoblast, e.g. in skeletal muscle, e.g. functions to decrease the amount of Tead1 RNA and/or protein in skeletal muscle. It follows that the term “agent” as used herein embraces Cytor agonists as well as Tead1 antagonists.

[0146] Alternatively viewed, an agent (a Cytor agonists or a Tead1 antagonist) functions to increase or promote the differentiation of myoblasts into type II myotubes, e.g. to increase or promote the size and/or number of type II myotubes, e.g. in a myoblast cell culture and/or in skeletal muscle. In a further aspect, the desired physiological effect is the promotion of myogenesis in the skeletal muscle of a subject, an increase in the skeletal muscle mass in a subject and/or an improvement in the skeletal muscle function in a subject. The term “agent” also encompasses pharmaceutically acceptable and pharmacologically active forms thereof, including salts.

[0147] An increase in the expression of Cytor RNA and/or a decrease in the expression of Tead1 RNA and/or protein in skeletal muscle or myoblast cells may be determined by any suitable means known in the art. In particular, the increase in Cytor RNA caused by the agent (i.e. Cytor agonist) and/or the decrease in the expression of RNA and/or protein is relative to a suitable control, e.g. skeletal muscle of a subject that has not been administered the agent or has been administered a control substance or myoblast cells that have not been contacted with the agent or have been contacted with a control substance. It will be evident to the skilled person that the effect of the agent on Cytor RNA and/or Tead1 RNA and/or protein in myoblast cells may be used as a proxy for the effect on skeletal muscle. Thus, an agent that increases the amount of Cytor RNA and/or decreases the amount of Tead1 RNA and/or protein in skeletal muscle also refers to an agent that increases the amount of Cytor RNA and/or decreases the amount of Tead1 RNA and/or protein in myoblast cells and these definitions may be used interchangeably herein.

[0148] Similarly, an increase in the the differentiation of myoblasts into type II myotubes, e.g. to increase or promote the size and/or number of type II myotubes, e.g. in a myoblast cell culture and/or in skeletal muscle may be determined by any suitable means known in the art. In particular, the increase in differentiation caused by the agent (i.e. Cytor agonist and/or Tead1 antagonist) is relative to a suitable control, e.g. skeletal muscle of a subject that has not been administered the agent or has been administered a control substance or myoblast cells that have not been contacted with the agent or have been contacted with a control substance.

[0149] The effects of the agent on myogenesis, skeletal muscle mass and skeletal muscle function may be measured using any suitable means known in the art. For instance, physical tests (e.g. walking tests, grip tests) may be used to measure the effects of the agent on muscle function. The effects on myogenesis and skeletal muscle mass may be determined using appropriate biomarkers (e.g. myosin gene expression) and/or by measuring muscle mass using imaging methods, e.g. MRI or CT scanning.

[0150] An agent (i.e. a Cytor agonist and/or Tead1 antagonist) may be a proteinaceous, non-proteinaceous (e.g. chemical entity) or nucleic acid molecule. Alternatively viewed, proteinaceous, non-proteinaceous (e.g. chemical entities) or nucleic acid molecules Cytor agonists and/or Tead1 antagonists may be used in treatments and methods described herein.

[0151] Proteinaceous molecules include peptides, polypeptides and proteins. The terms polypeptide and protein are used interchangeably herein.

[0152] Non-proteinaceous molecules include small, intermediate or large chemical molecules as well as molecules identified from natural product screening or the screening of chemical libraries. Thus, in some embodiments, the plurality of agents that may function as a Cytor agonist and/or Tead1 antagonist described above is a library (e.g. a drug screening library) of or comprising non-proteinaceous molecules compounds. Natural product screening includes the screening of extracts or samples from any suitable source of natural products including plants, microorganisms, soil, river beds, coral and aquatic environments for molecules or groups of molecules which have an effect on Cytor RNA activity and/or Tead1 activity, or the level of Cytor RNA (e.g. Cytor gene expression) and/or Tead1 RNA and/or protein (e.g. Tead1 gene expression). In some embodiments, the agent is a small or intermediate chemical molecule, e.g. a molecule with a molecular weight of about 1500 Da or less, e.g. about 1200 Da, 1100 Da, 1000 Da or less, such as about 100-1000 Da, 200-900 Da or 300-800 Da.

[0153] As shown in the Examples, Cytor RNA is an exercise-induced lncRNA. Whilst not wishing to be bound by theory, it is thought that agents (e.g. small or intermediate chemical molecules, e.g. drugs) that function as exercise mimetics, may result in a selective increase in Cytor RNA, i.e. may function as a Cytor agonist as defined herein. Exercise mimetics may be defined as pharmacological compounds or agents that are able to produce the benefits of fitness, such as mitochondrial remodeling effects including increased mitochondrial oxidative phosphorylation (OXPHOS) and fatty acid metabolism. For instance, muscle-targeted exercise mimetics offering exercise-mimicking benefits such as lower blood glucose levels, reduced inflammation and increased endurance have been developed and may also function as Cytor agonists. Accordingly, in some embodiments, the agent may be a drug that functions to increase the metabolic rate of cells (e.g. an exercise mimetics, such as a muscle targeted exercise mimetic), such as activators of AMP-activated protein kinase (AMPK), SIRT1 or PPARδ as well as ligands of REV-ERBα or ERRγ. Thus, in some embodiments, agents known to function to increase the metabolic rate of cells (e.g. an exercise mimetics, such as a muscle targeted exercise mimetic) may be used in the screening methods described above.

[0154] Nucleic acid molecule agents (“nucleic acids” or “polynucleotides”) include RNA, cDNA, genomic DNA, synthetic forms and mixed polymers, both sense and antisense strands (i.e. single and double stranded molecules), and may be chemically or biochemically modified or may contain non-natural or derivatized nucleotide bases, as will be readily appreciated by those skilled in the art. Also included are synthetic molecules that mimic polynucleotides in their ability to bind to a designated sequence via hydrogen binding and other chemical interactions. Such molecules are known in the art and include, for example, those in which peptide linkages substitute for phosphate linkages in the backbone of the molecule. In some embodiments, the nucleic acid molecules may be modified to increase their stability, e.g. relative to a corresponding unmodified nucleic acid. In particular, the nucleic acid molecule (e.g. RNA) may be modified to increase its resistance to degradation (e.g. by RNases). Suitable modifications are known in the art and any such modification may be used in the nucleic acid molecule agents of the invention.

[0155] In a preferred embodiment, the Cytor agonist is a nucleic acid molecule as defined above, e.g. Cytor RNA or a nucleic acid molecule (e.g. DNA molecule) encoding Cytor RNA. In a related preferred embodiment, the Tead1 agonist is a nucleic acid molecule or nucleotide-based inhibitor as defined above, e.g. a siRNA, shRNA or antisense molecule.

[0156] In the methods of identifying Cytor agonists and/or Tead1 agonists defined above, the step of contacting an agent from (a) with a myoblast cell (e.g. a plurality of myoblast cells) may comprise a step of contacting a cell culture comprising a plurality of myoblast cells under conditions suitable for the cells to express Cytor RNA and/or Tead1 RNA and protein. Suitable conditions may be determined as a matter of routine by culturing cells and determining whether they express Cytor RNA and/or Tead1 RNA and protein. The agent may be contacted in an amount that may be sufficient to affect the amount of Cytor RNA and/or Tead1 RNA and/or protein in the cells and will depend on the nature of the agent. The skilled person could determine a suitable amount of agent as a matter of routine experimentation.

[0157] The step of determining the amount of Cytor RNA and/or Tead1 RNA and/or protein in the myoblast cells may utilise any suitable methods known in the art. For instance, RNA (e.g. total RNA) and/or protein may be isolated from the cells and analysed to determine the amount of Cytor RNA and/or Tead1 RNA and/or protein present (e.g. by nucleic acid amplification and detection methods, e.g. real-time PCR, northern blotting etc.; or by protein detection methods, e.g. western blotting or mass spectrometry). Alternatively, the myoblast cells may be modified to incorporate a reporter molecule that is associated with Cytor RNA and/or Tead1 RNA and/or protein, such that the reporter molecule functions as a proxy for Cytor RNA and/or Tead1 RNA and/or protein and measuring the amount of the reporter molecule is indicative of the amount of Cytor RNA and/or Tead1 RNA and/or protein.

[0158] The step of measuring the size and/or number of type II myotubes after a suitable period of time may utilise any suitable methods known in the art. For instance, any cell microscopy methods may be used to count the number of type II myotubes and/or assess their size. It may not be necessary to measure the size and/or number of type II myotubes in the whole cell culture, i.e. a sample of the cell culture may be measured, e.g. the data may be used to extrapolate the number in the whole culture or may be compared to a corresponding sample from a control culture. It may be necessary or useful to stain the cells, e.g. myotubes, prior to measuring their size and/or number. Any suitable staining methods may be used.

[0159] Steps (b) and (c) of the methods above may be repeated for each agent in the plurality of agents, e.g. drug screening library, to identify multiple Cytor agonists and/or Tead1 antagonists. Thus, the method may be a high-throughput method and may utilise automated screening methods, e.g. robotics etc. Similarly, the method may be repeated (e.g. 2, 3, 4 or more times) for each agent to improve the accuracy of the method, i.e. to eliminate false positives or agents that have only a small effect on Cytor expression and/or Tead1 expression.

[0160] Identifying an agent that results in an increase in Cytor RNA, decrease in Tead1 RNA and/or protein, or in the size and/or number of type II myotubes compared to control myoblast cells involves comparing the effect of the agent on the myoblast cells to suitable control cells. The skilled person readily can determine which cells may be used as a control. For example, suitable control cells may be untreated cells or cells treated with an agent that does not result in an increase in Cytor RNA or in the size, decrease in Tead1 RNA and/or protein, and/or number of type II myotubes, e.g. the solvent (e.g. water or buffer) in which the agent is dissolved.

[0161] Functionally-equivalent variant Cytor RNA includes natural biological variants (e.g. allelic variants or splice variants within a species) as well as polynucleotides that are related to, or derived from, a naturally-occurring nucleic acid molecule. Functionally-equivalent Cytor RNA may be obtained by modifying a native polynucleotide sequence by single or multiple (e.g. 2-50, preferably 2-30 or 2-20) nucleotide mutations (i.e. substitutions, additions and/or deletions), but without destroying the molecule's function and/or overall structure. As a representative example, a functionally-equivalent variant polynucleotide (e.g. RNA) may contain one or more nucleotide mutations that do not eliminate the myogenic activity of the molecule, i.e. the capacity to promote the differentiation of myoblasts into type II myotubes. In some embodiments, the functionally-equivalent variant has at least 50%, preferably at least 70%, 80% or 90% of the myogenic activity of the related RNA. The activity of variant polynucleotides can be determined using methods that are routine in the art, e.g. expressing the variant RNA in a myoblast cell and determining the effect on differentiation into type II myotubes (e.g. the size and/or number of type II myotubes) relative to a myoblast cell expressing wild-type Cytor RNA under the same conditions.

[0162] Similarly, a functionally-equivalent portion or fragment refers to a polynucleotide (e.g. RNA) comprising a portion or fragment of a Cytor nucleotide sequence as defined herein, which may include a functionally-equivalent variant. A “portion” or “fragment” comprises at least 600, 650, 700, 750, 800 or more nucleotides of the sequence from which it is derived. Alternatively viewed, a portion or fragment retains at least about 70%, e.g. at least about 75%, 80%, 85%, 90% or 95% of the sequence from which it is derived. Said portion may be obtained from a central or 5′ or 3′ portion of the sequence. As a representative example, a functionally-equivalent portion (e.g. RNA) retains the myogenic activity of the equivalent full-length molecule, i.e. the capacity to promote the differentiation of myoblasts into type II myotubes. In some embodiments, the functionally-equivalent portion has at least 50%, preferably at least 70%, 80% or 90% of the myogenic activity of the related RNA (i.e. the RNA from which it is derived). The activity of polynucleotide portions or fragments can be determined using methods that are routine in the art, e.g. expressing the RNA portion in myoblast cells and determining the effect on differentiation into type II myotubes (e.g. the size and/or number of type II myotubes) relative to myoblast cells expressing wild-type (i.e. full-length) Cytor RNA under the same conditions.

[0163] The term “operably linked” refers to a functional linkage between two or more elements, e.g. polynucleotide or polypeptide elements. For example, an operable linkage between a polynucleotide encoding a Cytor RNA and a regulatory sequence (i.e. a promoter) is functional link that allows for the expression of the polynucleotide. Operably linked elements may be contiguous or non-contiguous.

[0164] The nucleic acid molecule agents of the invention may be Cytor RNA (or a functionally-equivalent fragment and/or variant thereof) or may be a nucleic acid molecule that encodes Cytor RNA or an alternative Cytor agonist, e.g. a polypeptide agonist such as a transcriptional activator. Thus, in some embodiments, the nucleic acid molecule agents of the invention may be administered as a suitable genetic construct as described below and delivered to the subject where it is expressed, e.g. to provide Cytor RNA directly. Typically, the nucleic acid in the genetic construct is operably linked to a promoter such that the nucleic acid is expressed in the cell. The genetic constructs of the invention can be prepared using methods well known in the art, for example in Sambrook et al (2001).

[0165] Genetic constructs for delivery of polynucleotides can be DNA or RNA. In some embodiments, they are DNA.

[0166] Preferably, the genetic construct is adapted for delivery to an animal (e.g. human) cell, particularly a myoblast cell. For instance, transposon systems (e.g. sleeping beauty, piggyBac etc.) may be used to integrate the nucleic acid molecule agent into the cell (e.g. myoblast cell) genome. Means and methods of introducing a genetic construct into a cell are known in the art and include the use of nanoparticles, such as immunoliposomes, liposomes, viral vectors (including vaccinia, modified vaccinia, lentivirus, parvovirus, retroviruses (e.g. replication defective retroviruses), adenovirus and adeno-associated viral (AAV) vectors). The term “viral vector” refers to a virus particle containing a nucleic acid molecule “vector”.

[0167] Furthermore, methods of delivering polynucleotides to a target tissue of a subject (patient) for treatment are also well known in the art. For instance, a high-efficiency nucleic acid delivery system that uses receptor-mediated endocytosis to carry DNA macromolecules into cells may be employed. This may be accomplished by conjugating the iron-transport protein transferrin to polycations that bind nucleic acids. High-efficiency receptor-mediated delivery of the DNA constructs or other genetic constructs of the invention using the endosome-disruption activity of defective or chemically inactivated adenovirus particles produced by the methods of Cotten et al (1992) Proc. Natl. Acad. Sci. USA 89, 6094-6098 may also be used. It will be appreciated that “naked DNA” and DNA complexed with cationic and neutral lipids may also be useful in introducing the DNA of the invention into cells of the individual to be treated. Non-viral approaches to gene therapy are described in Ledley (1995, Human Gene Therapy 6, 1129-1144).

[0168] Although it may be useful to use tissue-specific promoters in the vectors encoding or comprising the nucleic acid molecule agents of the invention, this is not essential, as the risk of expression of the nucleic acid molecule agent in the body at locations other than the desired site of action, e.g. skeletal muscle, would be expected to be tolerable in compared to the therapeutic benefit to a patient suffering from a disease or condition associated with muscle atrophy. It may be desirable to be able to temporally regulate expression of the nucleic acid molecule agent in the cell, although this is also not essential, and can be achieved using any suitable means known in the art.

[0169] Thus, in some embodiments, the Cytor agonist or agent of the invention is a vector comprising the nucleic acid molecule as described above. In some embodiments, the Cytor agonist or agent of the invention is a viral vector (e.g. a virus) comprising the nucleic acid molecule as described herein.

[0170] The term “myogenesis” refers to the formation of muscle or muscular tissue. Muscle fibres form through the fusion of myoblasts into multinucleated fibres termed “myotubes”. The terms “muscle fibre” and “myotube” are used interchangeably herein.

[0171] There are two main types of myotubes (muscle fibres) termed “type I” (“slow”) and “type II” (“fast” or “fast twitch”) myotubes. As shown in the Examples, increasing the amount of Cytor RNA and/or decreasing the amount of Tead1 RNA and/or protein in skeletal muscle (e.g. in myoblasts) results in an increase in the size (e.g. area and/or diameter) and number of type II myotubes, e.g. Cytor RNA functions to promote the differentiation of myoblasts into type II myotubes.

[0172] Thus, in some embodiments, the Cytor agonist and/or Tead1 antagonist of the invention may be used to promote myogenesis in skeletal muscle of a subject. In particular, the Cytor agonist and/or Tead1 antagonist of the invention may be used to promote type II myogenesis in skeletal muscle of a subject, i.e. to increase the size and/or number of type II myotubes (muscle fibres, i.e. so-called “fast-twitch” muscle fibres) in skeletal muscle. As noted above, an increase in the size and/or number of type II myotubes may be determined using any suitable means known in the art. In particular, the increase may be determined by comparing the size and/or number of type II myotubes in the treated subject to a suitable control, e.g. the size and/or number of type II myotubes in the skeletal muscle of the subject prior to treatment. The increase may be a relative increase, e.g. an increase in the proportion of type II myotubes in the skeletal muscle, or may be an absolute increase, e.g. an increase in the overall number and/or size of type II myotubes. In some preferred embodiments, the increase is an absolute increase.

[0173] In some embodiments, the Cytor agonist and/or Tead1 antagonist of the invention results in at least about a 1%, 2%, 3%, 4% or 5% increase in the number and/or size of type II myotubes in the skeletal muscle of the subject, such as about a 6%, 7%, 8%, 9%, 10% or more increase in the number and/or size of type II myotubes, e.g. about 12%, 15%, 20% or more.

[0174] An increase in the size and/or number of type II myotubes may result in an increase in the skeletal muscle mass of the subject, although the total mass of the subject may not increase (e.g. due to the increased metabolic demand associated with an increase in muscle mass). Thus, in some embodiments, the Cytor agonist and/or Tead1 antagonist of the invention may be used to increase skeletal muscle mass in a subject. An increase in skeletal muscle mass may be determined using any suitable means known in the art, e.g. muscle imaging techniques, such as MRI or CT scans. In particular, the increase may be determined by comparing the skeletal muscle mass in the treated subject to a suitable control, e.g. the mass the skeletal muscle of the subject prior to treatment.

[0175] In some embodiments, the Cytor agonist and/or Tead1 antagonist of the invention results in at least about a 1%, 2%, 3%, 4% or 5% increase muscle mass of the skeletal muscle of the subject, such as about a 6%, 7%, 8%, 9%, 10% or more increase muscle mass, e.g. about 12%, 15%, 20% or more.

[0176] It will be evident that an increase in the size and/or number of type II myotubes and/or an increase in skeletal muscle mass may result in an improvement in the function of the skeletal muscle of a subject. Thus, in some embodiments, the Cytor agonist and/or Tead1 antagonist of the invention may be used to improve skeletal muscle function in a subject. An improvement in skeletal muscle function may be an increase in the strength of the muscle. An increase in skeletal muscle function, e.g. strength, may be determined using any suitable means known in the art, e.g. physical tests, such as walking tests or grip strength tests. In particular, the increase may be determined by comparing the skeletal muscle function, e.g. strength, in the treated subject to a suitable control, e.g. the function (e.g. strength) of the skeletal muscle of the subject prior to treatment.

[0177] In some embodiments, the Cytor agonist and/or Tead1 antagonist of the invention results in at least about a 1%, 2%, 3%, 4% or 5% increase skeletal muscle function of the subject, such as about a 6%, 7%, 8%, 9%, 10% or more increase muscle mass, e.g. about 12%, 15%, 20% or more.

[0178] The increases described above may be an increase in a discrete area of skeletal muscle, e.g. a specific muscle or muscle group, or may be an increase in the overall skeletal muscle of the subject.

[0179] It will be evident that the Cytor agonist and/or Tead1 antagonist of the invention may have a combination of effects on skeletal muscle and these effects may be linked. For instance, promoting myogenesis may be expected to result in an increase in muscle mass and/or function. Thus, in some embodiments, the Cytor agonist and/or Tead1 antagonist may be for use in promoting myogenesis and muscle mass and/or muscle function. In some embodiments, the Cytor agonist and/or Tead1 antagonist may be for use in increasing skeletal muscle mass and function.

[0180] There are numerous diseases and conditions known in the art in which subjects suffer from a loss of type II muscle fibres, i.e. a reduction in the number and/or size of type II muscle fibres (myotubes). A loss of muscle fibres (including type II muscle fibres), resulting in a loss of muscle mass and/or function (e.g. strength) may also be termed “muscle atrophy”. Accordingly, the Cytor agonists and/or Tead1 antagonist of the invention are expected to find utility in the treatment and prevention of diseases and conditions associated with a loss of muscle fibres, particularly type II muscle fibres, or muscle atrophy and/or muscle dysfunction.

[0181] The term “muscle dysfunction” refers to skeletal muscles that show reduced strength and/or reduced endurance, i.e. muscles that are unable to perform their physiological tasks adequately. Muscle dysfunction can be expressed as fatigue and/or weakness. Thus, in some embodiments the Cytor agonists and/or Tead1 antagonists of the invention are expected to find utility in the treatment and/or prevention of muscle dysfunction, e.g. treating or preventing muscle fatigue and/or weakness. Alternatively viewed, the Cytor agonists and/or Tead1 antagonists of the invention may find utility in increasing muscle strength and/or endurance.

[0182] Thus, in some embodiments, the invention provides a Cytor agonist and/or Tead1 antagonist as defined herein for use in treating or preventing a loss of muscle fibres (e.g. type II muscle fibres or myotubes) in a subject. Alternatively viewed, the invention provides a Cytor agonist and/or Tead1 antagonist as defined herein for use in treating or preventing skeletal muscle atrophy in a subject. In a further embodiment, the invention provides a Cytor agonist and/or Tead1 antagonist as defined herein for use in treating or preventing a disease associated with a loss of muscle fibres (e.g. type II muscle fibres or myotubes) or treating or preventing a disease associated with muscle atrophy, i.e. where a symptom of the disease or condition is a loss of muscle fibres (e.g. type II muscle fibres or myotubes) or muscle atrophy. Methods of treating or preventing these conditions using a Cytor agonist and/or Tead1 antagonist as defined herein also form aspects of the invention.

[0183] A loss of muscle fibres or muscle atrophy may be associated with a lack or absence of physical activity. A loss of muscle fibres or muscle atrophy is also associated with ageing, which may be compounded by a reduction in physical activity. Thus, some subjects may have characteristics associated with an increased risk of developing skeletal muscle atrophy.

[0184] For instance, the age, activity, genetic characteristics (e.g. genotype), ethnicity and/or sex of the subject may be indicative of an increased risk of developing skeletal muscle atrophy, particularly in combination with an additional underlying condition as described below, e.g. a condition that renders the subject inactive or immobile.

[0185] Thus, in some embodiments, the subject to be treated has skeletal muscle atrophy (e.g. which is at risk of worsening) or is at risk (e.g. increased risk) of developing skeletal muscle atrophy, i.e. a loss of muscle fibres (e.g. type II muscle fibres).

[0186] In some embodiments, the subject with skeletal muscle atrophy (e.g. which is at risk of worsening) or at risk (e.g. increased risk) of developing skeletal muscle atrophy is at least 45 years old, e.g. 50, 55, 60, 65 years old or above (i.e. an aged or ageing, e.g. an elderly, subject). Alternatively viewed, the subject to be treated may be at least 45 years old, e.g. 50, 55, 60, 65 years old or above (i.e. an aged or ageing e.g. an elderly, subject). In some particular embodiments, the subject selected for a preventative treatment, i.e. to prevent the development of muscle atrophy or worsening (a deterioration of) muscle atrophy is at least 45 years old, e.g. 50, 55, 60, 65 years old or above.

[0187] In some embodiments, the subject with skeletal muscle atrophy (e.g. which is at risk of worsening) or at risk (e.g. increased risk) of developing skeletal muscle atrophy is inactive or immobile. Alternatively viewed, the subject to be treated may be inactive or immobile. A subject may be inactive or immobile due to an underlying condition or injury that results in a loss of mobility. For instance, the subject may be obese (e.g. morbidly obese) or physically disabled, e.g. they may have a brain or spinal cord injury, multiple sclerosis, cerebral palsy, a respiratory disorder, epilepsy or a hearing or visual impairment that results in a loss of mobility.

[0188] As shown in the Examples and FIG. 20, the inventors have identified a genetic marker that is associated with an increased risk of muscle atrophy, particularly in aging subject, e.g. associated with an increased risk of developing sarcopenia. The genetic marker is the cis-eQTL rs74360723, wherein subjects that are heterozygous or homozygous for the G allele of cis-eQTL rs74360724 have an increased risk of developing muscle atrophy, e.g. sarcopenia, relative to subjects that are homozygous for the A allele of cis-eQTL rs74360724. Alternatively or in addition, the genetic marker is the cis-eQTL rs 79200838, wherein subjects that are heterozygous or homozygous for the A allele of cis-eQTL rs79200838 have an decreased risk of developing muscle atrophy, e.g. sarcopenia, relative to subjects that are homozygous for the C allele of cis-eQTL rs79200838. Thus, in some embodiments the subject with skeletal muscle atrophy (e.g. which is at risk of worsening) or at risk (e.g. increased risk) of developing skeletal muscle atrophy is heterozygous or homozygous (particularly homozygous) for the G allele of cis-eQTL rs74360724. Alternatively viewed, the subject to be treated may be heterozygous or homozygous (particularly homozygous) for the G allele of cis-eQTL rs74360724. Similarly, in some embodiments the subject with skeletal muscle atrophy (e.g. which is at risk of worsening) or at risk (e.g. increased risk) of developing skeletal muscle atrophy is heterozygous or homozygous (particularly homozygous) for the Callele of cis-eQTL rs79200838. Alternatively viewed, the subject to be treated may be heterozygous or homozygous (particularly homozygous) for the C allele of cis-eQTL rs79200838.

[0189] In some embodiments, a subject may be selected for preventative treatment with a Cytor agonist and/or a Tead1 antagonist of the invention based on their genotype, i.e. their cis-eQTL rs74360724 and/or cis-eQTL rs79200838 genotype. Thus, in a further aspect the invention provides a method for selecting or identifying a subject for treatment according to the invention comprising determining the genotype of the subject at the cis-eQTL rs74360724, wherein when the subject is heterozygous or homozygous for the G allele or at the cis-eQTL rs79200838, wherein when the subject is heterozygous or homozygous for the C allele the subject is selected for treatment with a Cytor agonist and/or a Tead1 antagonist.

[0190] Thus, in some embodiments, the method may be viewed as determining the suitability of a subject for treatment according to the invention.

[0191] Thus, in some preferred embodiments, the method is for selecting a subject (determining the suitability of a subject) for preventative treatment, i.e. to prevent the development of skeletal muscle atrophy or a deterioration of existing skeletal muscle atrophy (e.g. sarcopenia).

[0192] A disease or condition associated with a loss of muscle fibres (e.g. type II muscle fibres or myotubes) or muscle atrophy refers to any condition in which a loss of muscle fibres (particularly type II muscle fibres) is observed. Suitably, a disease or condition associated with a loss of muscle fibres (e.g. type II muscle fibres or myotubes) or muscle atrophy includes sarcopenia, cachexia (e.g. cancer cachexia or AIDS cachexia), sepsis, diabetes (particularly type I diabetes), muscular dystrophy (e.g. Duchenne Muscular Dystrophy, Becker's MD, Congenital MD, Myotonic dystrophy, Limb-girdle MD, Emery-Dreifuss MD, Distal MD and Facioscapulohumeral Muscular Dystrophy), Chronic Heart Failure (e.g. diaphragm muscle atrophy resulting from Chronic Heart Failure), Chronic Obstructive Pulmonary Disease (e.g. diaphragm muscle atrophy resulting from Chronic Obstructive Pulmonary Disease), Amyotrophic Lateral Sclerosis (ALS), Spinal Muscular Atrophy, Guillain-Barré syndrome, intensive care unit-acquired weakness (ICUAW), immobilization resulting from bone fractures (e.g. hip (femur neck) fractures) and immobilization resulting from an infection (e.g. a bacterial or viral infection, such as a coronavirus infection, e.g. COVID-19).

[0193] Thus, in some embodiments, the invention provides a Cytor agonist and/or Tead1 antagonist as defined herein for use in treating or preventing a loss of muscle fibres (e.g. type II muscle fibres or myotubes) or muscle atrophy in a subject with (i.e. suffering from) or is at risk of developing sarcopenia, cachexia (e.g. cancer cachexia or AIDS cachexia), sepsis, diabetes (particularly type I diabetes), muscular dystrophy (e.g. Duchenne Muscular Dystrophy, Becker's MD, Congenital MD, Myotonic dystrophy, Limb-girdle MD, Emery-Dreifuss MD, Distal MD and Facioscapulohumeral Muscular Dystrophy), Chronic Heart Failure (e.g. diaphragm muscle atrophy resulting from Chronic Heart Failure), Chronic Obstructive Pulmonary Disease (e.g. diaphragm muscle atrophy resulting from Chronic Obstructive Pulmonary Disease), Amyotrophic Lateral Sclerosis (ALS), Spinal Muscular Atrophy, Guillain-Barré syndrome, intensive care unit acquired weakness, immobilization resulting from bone fractures (e.g. hip (femur neck) fractures) or immobilization resulting from an infection.

[0194] In a further embodiment, the invention provides a Cytor agonist and/or Tead1 antagonist as defined herein for use in treating or preventing starvation, sarcopenia, cachexia (e.g. cancer cachexia or AIDS cachexia), sepsis, diabetes (particularly type I diabetes), muscular dystrophy (e.g. Duchenne Muscular Dystrophy, Becker's MD, Congenital MD, Myotonic dystrophy, Limb-girdle MD, Emery-Dreifuss MD, Distal MD and Facioscapulohumeral Muscular Dystrophy), Chronic Heart Failure (e.g. diaphragm muscle atrophy resulting from Chronic Heart Failure), Chronic Obstructive Pulmonary Disease (e.g. diaphragm muscle atrophy resulting from Chronic Obstructive Pulmonary Disease), Amyotrophic Lateral Sclerosis (ALS), Spinal Muscular Atrophy, Guillain-Barré syndrome, intensive care unit acquired weakness, immobilization resulting from bone fractures (e.g. hip (femur neck) fractures) or immobilization resulting from an infection.

[0195] Among the above-discussed diseases Duchenne Muscular Dystrophy, Myotonic dystrophy, type 2, Facioscapulohumeral Muscular Dystrophy, sepsis, cachexia, starvation are preferred since they are associated with fast-twitch muscle fibers. As discussed above, a loss of fast-twitch muscle fibers may particularly well be treated by a Tead1 antagonist.

[0196] Methods of treating or preventing these conditions using a Cytor agonist and/or Tead1 antagonist as defined herein also form aspects of the invention.

[0197] Sarcopenia refers to a syndrome characterized by progressive and generalized loss of skeletal muscle mass and strength. Sarcopenia may by defined as the presence of low skeletal muscle mass and either low muscle strength (e.g., handgrip) or low muscle performance (e.g., walking speed or muscle power); when all three conditions are present, severe sarcopenia may be diagnosed. Thus, in some embodiments, the Cytor agonist and/or a Tead1 antagonist is for use in treating or preventing severe sarcopenia.

[0198] In a representative embodiment, the diagnosis of sarcopenia can be assessed by measuring muscle mass, e.g. using dual energy X-Ray absorptiometry. The subject may be diagnosed as having sarcopenia if their muscle mass is considered to be low, e.g. where the percentage of muscle mass divided by height squared is below two standard deviations of the normal young mean (<7.23 kg/m² in men and in women at <5.67 kg/m²) as defined using dual energy X-Ray absorptiometry. Walking speed and/or grip strength may be used as primary indicators for sarcopenia, which is confirmed by measuring muscle mass. For example a diagnosis of sarcopenia (e.g. in an aged, i.e. elderly, subject) can be carried out by assessing the following parameters:
[0199] 1. Measure walking speed. If walking speed for the subject (e.g. elderly, such as >65 years) is below 0.8 m/s at the 4-m walking test, measure the muscle mass.
[0200] 2. If the walking speed at the 4-m walking test is higher than 0.8 m/s the hand-grip strength should be tested; if this value is lower than 20 Kg in women and 30 Kg in man, the muscle mass must be analyzed as described above.

[0201] Cachexia, also known as “wasting syndrome” is a complex syndrome associated with an underlying illness that causes ongoing muscle loss that is not entirely reversed with nutritional supplementation. Numerous diseases can cause cachexia, including cancer, congestive heart failure (CHF), chronic obstructive pulmonary disease (COPD), chronic kidney disease and AIDS. It is thought that systemic inflammation from these diseases may cause detrimental changes to metabolism and therefore body composition, including muscle mass. Thus, in some embodiments, cachexia is cancer cachexia, CHF cachexia, COPD cachexia, chronic kidney disease cachexia or AIDS cachexia.

[0202] Intensive care unit-acquired weakness (ICUAW) refers to weakness that is classified into three component conditions: critical illness polyneuropathy (CIP), critical illness myopathy (CIM), and critical illness neuromyopathy (CINM). CIP and CIM frequently co-exist (CINM) and when present separately cannot be reliably distinguished clinically. ICUAW may result from numerous conditions that result in a prolonged period under intensive care, particularly involving prolonged mechanical ventilation. In particular, ICUAW is prominent in subjects with severe sepsis or multiple organ failure.

[0203] Muscular dystrophy (MD) refers to a group of muscle diseases that results in increasing weakening and breakdown of skeletal muscles over time. MD includes Duchenne Muscular Dystrophy, Becker's MD, Congenital MD, Myotonic dystrophy, Limb-girdle MD, Emery-Dreifuss MD, Distal MD and Facioscapulohumeral Muscular Dystrophy.

[0204] Spinal muscular atrophy (SMA) refers to a heterogeneous group of rare debilitating disorders characterised by the degeneration of lower motor neurons (neuronal cells situated in the anterior horn of the spinal cord) and subsequent atrophy (wasting) of various muscle groups in the body. SMA includes proximal spinal muscular atrophies and distal spinal muscular atrophies. In some embodiments, SMA is autosomal recessive proximal spinal muscular atrophy.

[0205] Guillain-Barré syndrome is an acute (rapid-onset) muscle weakness caused by the immune system damaging the peripheral nervous system which typically results in muscle weakness, beginning in the feet and hands, which subsequently spreads to the arms and upper body.

[0206] Amyotrophic lateral sclerosis (ALS) (also known as motor neuron disease or Lou Gehrig's disease) refers to a debilitating disease with varied etiology characterized by rapidly progressive weakness, muscle atrophy and fasciculations, muscle spasticity, difficulty speaking (dysarthria), difficulty swallowing (dysphagia), and difficulty breathing (dyspnea).

[0207] The terms “treating” or “treatment” as used herein refer broadly to any effect or step (or intervention) beneficial in the management of a clinical condition or disorder. Treatment therefore may refer to reducing, alleviating, ameliorating, slowing the development of, or eliminating one or more symptoms of the disease, condition or syndrome that is being treated, relative to the symptoms prior to treatment, or in any way improving the clinical status of the subject. A treatment may include any clinical step or intervention which contributes to, or is a part of, a treatment programme or regimen.

[0208] A treatment may include delaying, limiting, reducing or preventing the onset of one or more symptoms of the disease, condition or syndrome (i.e. muscle fibre loss, muscle atrophy), for example relative to the symptom prior to the treatment. Thus, treatment explicitly includes both absolute prevention of occurrence or development of symptoms of the disease, condition or syndrome, and any delay in the development of the disease, condition or syndrome or symptom thereof, or reduction or limitation on the development or progression of the disease, condition or syndrome or symptom thereof.

[0209] As discussed further in the Examples, it is thought that increasing the amount of Cytor RNA and/or decreasing the amount of Tead1 RNA and/or protein in skeletal muscle (and/or its activity) functions to promote the differentiation of myoblasts into type II myotubes, thereby increasing the number and/or size of type II myotubes and/or muscle mass (e.g. type II muscle fibre mass) and rejuvenating the muscle tissue. Thus, the term “treatment” does not necessarily imply cure of the disease or condition or complete rejuvenation of the muscle tissue or symptoms thereof.

[0210] The terms “subject” and “patient” are used interchangeably herein and refer to a mammal, preferably a human. In some embodiments (e.g. where the agonist is used to increase muscle mass in a subject), the subject is a non-human animal, particularly a domesticated or farmed animal, e.g. livestock (such as poultry, pigs, cattle, sheep or goats) or farmed fish (e.g. salmon, tilapia or tuna).

[0211] The Cytor agonist and/or Tead1 antagonist may be provided in pharmaceutical composition, which may be formulated according to any of the conventional methods known in the art and widely described in the literature. Thus, a Cytor agonist and/or Tead1 antagonist may be incorporated, optionally together with other active (e.g. therapeutic) substances, with one or more conventional carriers, diluents and/or excipients. A pharmaceutical composition comprising a Cytor agonist and/or Tead1 antagonist as defined herein represents a further aspect of the invention.

[0212] The pharmaceutical composition described herein may be administered systemically or locally to the subject using any suitable means and the route of administration will depend on formulation of the pharmaceutical composition.

[0213] In some embodiments, systemic administration may be particularly useful. “Systemic administration” includes any form administration in which the agent (i.e. Cytor agonist and/or Tead1 antagonist) is administered to the body resulting in the whole body receiving the administered agent. Conveniently, systemic administration may be via enteral delivery (e.g. oral) or parenteral delivery (e.g. intravenous, intramuscular, subcutaneous, intratracheal, endotracheal, inhalation).

[0214] “Local administration” refers to administration of the Cytor agonist and/or Tead1 antagonist at the primary site of muscle loss (e.g. one or more skeletal muscles or muscle groups) or in the local vicinity of the primary site of muscle loss, e.g. via intramuscular injection. However, it will be evident that some forms of local administration may result in the whole body receiving the administered agent. Thus, in some embodiments, the Cytor agonist and/or Tead1 antagonist may be administered to provide an initial local effect and subsequent systemic effect.

[0215] Reference to “systemic administration” includes intra-articular, intravenous, intramuscular, intraperitoneal, and subcutaneous injection, infusion, as well as administration via oral, rectal and nasal routes, or via inhalation. Administration by intramuscular subcutaneous injection or via intravenous injection or infusion is particularly preferred.

[0216] Thus, in some embodiments, the Cytor agonist and/or Tead1 antagonist may be provided and/or formulated for intravenous, subcutaneous, transdermal or intramuscular administration. In some embodiments, the Cytor agonist and/or Tead1 antagonist (i.e. pharmaceutical composition) is administered by intramuscular administration.

[0217] The pharmaceutical composition may include one or more excipient, diluent, binder, lubricant, glidant, disintegrant, desensitizing agent, emulsifier, solubilizer, suspension agent, viscosity modifier, ionic tonicity agent, buffer, carrier, surfactant, flavor, or mixture thereof.

[0218] Examples of suitable pharmaceutical carriers, excipients and/or diluents are well-known in the art and include, but are not limited to, a gum, a starch (e.g. corn starch, pregeletanized starch), a sugar (e.g., lactose, mannitol, sucrose, dextrose), a cellulosic material (e.g. microcrystalline cellulose), an acrylate (e.g. polymethylacrylate), calcium carbonate, magnesium oxide, or mixtures thereof.

[0219] Pharmaceutically acceptable carriers for liquid formulations are aqueous or non-aqueous solutions, suspensions, emulsions or oils. Examples of non-aqueous solvents are propylene glycol, polyethylene glycol, and injectable organic esters such as ethyl oleate. Examples of oils are those of animal, vegetable, or synthetic origin, for example, peanut oil, soybean oil, olive oil, sunflower oil, fish-liver oil, another marine oil, or a lipid from milk or eggs.

[0220] Aqueous carriers include water, alcoholic/aqueous solutions, emulsions or suspensions, including saline and buffered media such as phosphate buffered saline solutions, water, emulsions, such as oil/water emulsions, various types of wetting agents, sterile solutions etc. Compositions comprising such carriers can be formulated by well-known conventional methods. Suitable carriers may comprise any material which, when combined with the Cytor agonist and/or Tead1 antagonist, retains the biological activity.

[0221] Preservatives and other additives may also be present including, for example, antimicrobials, anti-oxidants, chelating agents, and inert gases and the like. In addition, the pharmaceutical composition may comprise proteinaceous carriers like, e.g., serum albumin or immunoglobulin, preferably of human origin.

[0222] In some embodiments, the pharmaceutical composition may also be administered as a controlled-release composition, i.e. a composition in which the active ingredient is released over a period of time after administration. Controlled- or sustained-release compositions include formulation in lipophilic depots (e.g. fatty acids, waxes, oils). In another embodiment, the composition is an immediate-release composition, i.e. a composition in which all the active ingredient is released immediately after administration. Further examples for suitable formulations are provided in WO 2006/085983, the entire contents of which are incorporated by reference herein. For example, the pharmaceutical composition may be provided as liposomal formulations. The technology for forming liposomal suspensions is well-known in the art. The lipid layer employed can be of any conventional composition and can either contain cholesterol or can be cholesterol-free. The liposomes can be reduced in size, as through the use of standard sonication and homogenization techniques. Liposomal formulations containing the agent or pharmaceutical composition can be lyophilized to produce a lyophilizate which can be reconstituted with a pharmaceutically acceptable carrier, such as water, to regenerate a liposomal suspension.

[0223] In some embodiments, the pharmaceutical composition is a “ready to use” formulation that contains the Cytor agonist and/or Tead1 antagonist in dissolved or solubilized form and is intended to be used as such or upon further dilution in pharmaceutically acceptable (e.g. intravenous) diluents. However, in some embodiments, the pharmaceutical composition may be provided in a solid form, e.g. as a lyophilizate, to be dissolved in a suitable solvent to provide a liquid formulation.

[0224] In some embodiments, the Cytor agonist and/or Tead1 antagonist (e.g. small molecule) may be in the form of a salt, i.e. a pharmaceutically acceptable salt. For instance, the Cytor agonist and/or Tead1 antagonist may be in the form of an acidic or basic salt. In some embodiments, the Cytor agonist and/or Tead1 antagonist is in a neutral salt form.

[0225] Pharmaceutically acceptable salts include pharmaceutical acceptable base addition salts and acid addition salts, for example, metal salts, such as alkali and alkaline earth metal salts, ammonium salts, organic amine addition salts, and amino acid addition salts, and sulfonate salts. Acid addition salts include inorganic acid addition salts such as hydrochloride, sulfate and phosphate, and organic acid addition salts such as alkyl sulfonate, arylsulfonate, acetate, maleate, fumarate, tartrate, citrate and lactate. Examples of metal salts are alkali metal salts, such as lithium salt, sodium salt and potassium salt, alkaline earth metal salts such as magnesium salt and calcium salt, aluminum salt, and zinc salt. Examples of ammonium salts are ammonium salt and tetramethylammonium salt. Examples of organic amine addition salts are salts with morpholine and piperidine. Examples of amino acid addition salts are salts with glycine, phenylalanine, glutamic acid and lysine. Sulfonate salts include mesylate, tosylate and benzene sulfonic acid salts.

[0226] “Pharmaceutically acceptable” as referred to herein refers to ingredients that are compatible with other ingredients used in the methods or uses of the invention as well as physiologically acceptable to the recipient.

[0227] The Cytor agonist and/or Tead1 antagonist as defined herein may be administered to the subject in an effective amount, i.e. a therapeutically effective amount. The terms “effective amount” and “therapeutically effective amount” as used herein mean a sufficient amount of an Cytor agonist and/or Tead1 antagonist that provides the desired therapeutic or physiological effect or outcome by increasing the amount and/or activity of Cytor RNA and/or by decreasing the amount and/or activity of Tead1 RNA and/or protein (directly or indirectly as defined above). In addition, the effect may be an amelioration of the symptoms of the disease or condition (e.g. muscle atrophy) described here and/or complications arising from same or manifestations thereof. Undesirable effects, e.g. side effects, may sometimes manifest along with the desired therapeutic effect; hence, a practitioner balances the potential benefits against the potential risks in determining what is an appropriate “effective amount”.

[0228] The exact amount of Cytor agonist and/or Tead1 antagonist required will vary from subject to subject, depending on the numerous parameters such as age and general condition of the subject, mode of administration, weight, body surface area, sex, other drugs being administered concurrently and the like. Thus, it may not be possible to specify an exact “effective amount”. However, an appropriate “effective amount” in any individual case may be determined by one of ordinary skill in the art using routine experimentation.

[0229] The dosage regimen of the Cytor agonist and/or Tead1 antagonist will be determined by the attending physician and clinical factors. As is well known in the medical arts, dosages for any one subject depend upon many factors, including the subject's size, body surface area, age, the particular compound to be administered, sex, time and route of administration, general health, and other drugs being administered concurrently.

[0230] By way of example, in some embodiments of the invention the Cytor agonist and/or Tead1 antagonist is administered daily or every 2-3 days. In some embodiments, the Cytor agonist or agent may be administered for at least three days, e.g. for 3, 4, 5, 6, 7, 8, 9 10 or more days (e.g. 20, 25, 30 or more days). This administration may be in a single cycle or in total in multiple cycles.

[0231] In some embodiments of the invention the Cytor agonist and/or Tead1 antagonist is administered weekly or every 2-3 weeks. In some embodiments, the Cytor agonist and/or Tead1 antagonist may be administered for at least three weeks, e.g. for 3, 4, 5, 6, 7, 8, 9 10 or more weeks (e.g. 20, 25, 30 or more weeks). This administration may be in a single cycle or in total in multiple cycles.

[0232] As referred to herein a “cycle” is a time period over which a particular treatment regime is applied and is generally repeated to provide cyclical treatment. The treatment in each cycle may be the same or different (e.g. different dosages, timings etc. may be used). In some embodiments, a cycle may be from 3-6 or 3-12 days in length, e.g. a 3, 4, 6, 9 or 12 day cycle. In some embodiments, a cycle may be about 1-6 weeks, i.e. daily administration for about 1-6, e.g. 1-4 or 1-3 weeks, such as about 1 or 2 weeks. In some embodiments, the cycle is repeated at least once. Thus, multiple cycles may be used, e.g. at least 2, 3, 4 or 5 cycles, e.g. 6, 7, 8, 9 or 10 (e.g. 10, 20, 30 or more) cycles.

[0233] In some embodiments, treatment cycles may be delimited by a break in treatment, e.g. a period without daily administration of the Cytor agonist and/or Tead1 antagonist. In some embodiments, the period between cycles is at least one day, e.g. 2, 3, 4 or more days. In some embodiments, the period between cycles is at least one week, e.g. 2, 3, 4 or more weeks.

[0234] However, in some embodiments, the second or subsequent treatment cycle may immediately follow the first or previous cycle. For instance, if the third daily dose of the first cycle was administered on day 3±1 day, the first daily dose of the second cycle may be administered on day 4±1 day.

[0235] In some embodiments of the invention, the patient may be subjected to other treatments prior to, contemporaneously with, or after the treatments of the present invention. For instance, in some embodiments, the patient may be treated with other procedures for the treatment of symptoms associated with the disease or condition that results in muscle fibre loss/muscle atrophy according to procedures known in the art.

[0236] In some embodiments, the Cytor agonist and/or Tead1 antagonist may be administered in combination with other therapeutic agents for the treatment of symptoms associated with the disease or condition that results in muscle fibre loss/muscle atrophy or other underlying condition, e.g. AIDS, CHF, COPD, cancer etc.

[0237] Thus, in some embodiments, the pharmaceutical composition containing the Cytor agonist and/or Tead1 antagonist may contain one or more additional therapeutic agents or may be for administration with one or more additional therapeutic agents.

[0238] The other therapeutic agents may be part of the same composition already comprising the Cytor agonist and/or Tead1 antagonist, in the form of a mixture, wherein the Cytor agonist and/or Tead1 antagonist and the other therapeutic agent are intermixed in or with the same pharmaceutically acceptable solvent and/or carrier or may be provided separately as part of a separate compositions, which may be offered separately or together in form of a kit of parts.

[0239] Thus, the Cytor agonist and/or Tead1 antagonist may be administered concomitantly with the other therapeutic agent separately, simultaneously or sequentially. For example, the Cytor agonist and/or Tead1 antagonist may be administered simultaneously with a first additional therapeutic agent or sequentially after or before administration of said first additional therapeutic agent. If the treatment regimen or schedule utilizes more than one additional therapeutic agent, the various agents may be partially administered simultaneously, partially sequentially in various combinations.

[0240] Thus, in some embodiments, the invention provides a Cytor agonist and/or Tead1 antagonist as defined herein in a combined product with another therapeutic agent for separate, simultaneous or sequential administration for use in treating or preventing a disease and/or condition associated with a loss of muscle fibres, particularly type II muscle fibres, or muscle atrophy.

[0241] Alternatively viewed, the method of the invention further comprises administering another therapeutic agent to said subject, wherein said therapeutic agent is administered separately, simultaneously or sequentially to the Cytor agonist and/or Tead1 antagonist as defined herein.

[0242] The therapeutic agents for use in combination with the Cytor agonist and/or Tead1 antagonist may be provided in pharmaceutical compositions as defined above and may be administered as defined above. Thus, the compositions comprising additional therapeutic agents may comprise pharmaceutically acceptable excipients, solvents and diluents suitable for such formulations.

[0243] The skilled person will be aware of suitable dosage ranges for any given additional therapeutic agent. In preferred embodiments, the additional therapeutic agent is present in the pharmaceutical composition, or administered to the subject, in its typical dose range.

[0244] The production of meat has a significant environmental impact and more efficient methods of meat production are desirable. Significant efforts have been dedicated to the production of “lab grown” meat in recent years.

[0245] As shown in the Examples, Cytor is a conserved lncRNA and Tead1 is a conserved transcription factor in animals. They have been shown to regulate myoblast differentiation into type II myoblasts. For instance, overexpression of Cytor in animals results in an increase in muscle mass. Accordingly, the inventors further propose modulation of Cytor (i.e. increase) and/or Tead1 (i.e decrease) expression in muscle cells (myoblasts) for the production of muscle fibres, e.g. for the in vitro production of meat. Moreover, modulation of Cytor and/or Tead1 expression in vivo, i.e. in non-human animals, is expected to result in animals with increased muscle mass and/or leaner meat.

[0246] Thus, a further aspect of the invention provides a modified non-human animal which has an increased amount of Cytor RNA and/or decreased amount of Tead1 RNA and/or protein in its skeletal muscle in comparison to a corresponding unmodified non-human animal.

[0247] In some embodiments the modified non-human animal has at least about a 1%, 2%, 3%, 4% or 5% increase in the amount of Cytor RNA and/or decrease in the amount of Tead1 RNA and/or protein in the skeletal muscle of the animal, such as about a 6%, 7%, 8%, 9%, 10% or more increase in the amount of Cytor RNA and/or decrease in the amount of Tead1 RNA and/or protein, e.g. about 12%, 15%, 20% or more, compared to a corresponding unmodified non-human animal.

[0248] The modified non-human animal may have an increased amount (e.g. size and/or number) of type II myotubes (muscle fibres) and/or an increased muscle mass compared to a corresponding unmodified non-human animal.

[0249] In some embodiments the modified non-human animal has at least about a 1%, 2%, 3%, 4% or 5% increase in the number and/or size of type II myotubes in the skeletal muscle of the animal, such as about a 6%, 7%, 8%, 9%, 10% or more increase in the number and/or size of type II myotubes, e.g. about 12%, 15%, 20% or more, compared to a corresponding unmodified non-human animal.

[0250] In some embodiments, the modified non-human animal has at least about a 1%, 2%, 3%, 4% or 5% increase muscle mass of the skeletal muscle of the animal, such as about a 6%, 7%, 8%, 9%, 10% or more increase muscle mass, e.g. about 12%, 15%, 20% or more, compared to a corresponding unmodified non-human animal.

[0251] In some embodiments, the modified non-human animal has been administered a Cytor agonist and/or Tead1 antagonist as defined above. In some embodiments, the Cytor agonist and/or Tead1 antagonist is a gene therapy.

[0252] Thus, in some embodiments, the modified non-human animal has been genetically-modified to increase the expression of Cytor RNA and/or decrease the expression of Tead1 RNA and/or protein.

[0253] Any suitable method of genetically-modifying the non-human animal to have increased Cytor RNA and/or decreased Tead1 RNA and/or protein may be used to produce the modified non-human animal. For instance, the endogenous Cytor promoter or enhancer may be modified or replaced to increase Cytor expression, e.g. the promoter or a part thereof, may be replaced with a heterologous promoter that results in increased expression of Cytor. Similarly, the endogenous Tead1 promoter or enhancer may be modified or replaced to decrease Tead1 expression, e.g. the promoter or a part thereof, may be replaced with a heterologous promoter that results in decreased expression of Tead1. In a further representative embodiment, the animal may be modified to include in its genome one or more additional copies of the Cytor gene or coding sequence and/or modified to mutate the Tead1 gene, so that a decreased amount of Tead1 RNA and/or protein is expressed.

[0254] Thus, in some embodiments, the modified non-human animal comprises in its genome (e.g. stably integrated into its genome), and is capable of expressing, one or more (e.g. one or two) nucleotide sequences encoding Cytor (as defined elsewhere herein), preferably wherein one nucleotide sequence is operably linked to a heterologous regulatory sequence (e.g. promoter). In some embodiments, the heterologous regulatory sequence (e.g. promoter) is a tissue-specific or cell-specific promoter, e.g. a muscle-specific (e.g. skeletal muscle-specific) or myoblast-specific promoter.

[0255] In a further aspect, the invention provides a method for producing a genetically-modified non-human animal as defined above. Methods of generating genetically modified non-human animals, e.g. from non-human pluripotent stem cells, are well-known in the art.

[0256] In a representative embodiment, the method comprises:
[0257] (i) providing a non-human cell (e.g. a non-human pluripotent stem cell or germ cell) which has been genetically-modified such that myoblast cells derived from said cell express an increased amount of Cytor RNA and/or decreased amount of Tead1 RNA and/or protein compared to unmodified myoblast cells; and
[0258] (ii) generating a genetically-modified non-human animal from said genetically-modified non-human cell (e.g. non-human pluripotent stem cell or germ cell).

[0259] Methods of producing non-human pluripotent stem cells, and genetically-modifying said cells, are known in the art and any suitable method may be used to provide the genetically-modified cell used in the method of the invention.

[0260] In some embodiments, the non-human pluripotent stem cell is a non-human pluripotent stem cell which comprises in its genome (e.g. stably integrated into its genome), one or more (e.g. one or two) nucleotide sequences encoding Cytor (as defined elsewhere herein), preferably wherein one nucleotide sequence is operably linked to a heterologous regulatory sequence (e.g. promoter). In some embodiments, the heterologous regulatory sequence (e.g. promoter) is a tissue-specific or cell-specific promoter, e.g. a muscle-specific (e.g. skeletal muscle-specific) or myoblast-specific promoter as defined above. In some related embodiments, the non-human pluripotent stem cell is a non-human pluripotent stem cell in which the Tead1 gene (one copy and preferably both copies) has been mutated, so that a decreased amount of Tead1 RNA and/or protein is expressed.

[0261] Typically and preferably, the step of generating a genetically-modified non-human animal of step (ii) comprises:
[0262] (a) introducing one or more non-human pluripotent stem cells of step (i) into a pre-implantation embryo of an animal of the same species;
[0263] (b) transferring said pre-implantation embryo into which one or more of said non-human pluripotent stem cells have been introduced in (a) into a female pseudo-pregnant non-human animal of the same species; and
[0264] (c) identifying a founder animal amongst the offspring of the female non-human animal of (b); and optionally
[0265] (d) mating said founder animal of (c) and identifying offspring thereof that have a genome the genetic modification that results in myoblast cells in said animal expressing an increased amount of Cytor RNA and/or decreased amount of Tead1 RNA and/or protein compared to unmodified myoblast cells.

[0266] In some embodiments, in step (a) the introduction of one or more non-human pluripotent stem cells into a pre-implantation embryo is done by injection.

[0267] In some embodiments, in step (d) a founder animal is typically mated with a non-founder animal of the same species. In some embodiments, in step (d), if the non-human pluripotent stem cells of (a) comprise a marker for positive selection flanked by site-specific recombination sites (e.g. loxP sites), the founder animal may be mated with an animal that expresses a site specific recombinase enzyme (e.g. Cre recombinase) in order to remove the marker for positive selection.

[0268] Typically, in step (d), the identifying of offspring comprises determining the genotype of the offspring to identify offspring that have a genome comprising the genetic modification that results in myoblast cells in said animal expressing an increased amount of Cytor RNA and/or decreased amount of Tead1 RNA and/or protein compared to unmodified myoblast cells. Alternatively viewed, in step (d) the identifying of offspring comprises identifying those offspring that result from germline transmission of genomic DNA of the non-human pluripotent stem cell of (a), said genomic DNA comprising the genetic modification that results in myoblast cells in said animal expressing an increased amount of Cytor RNA and/or decreased amount of Tead1 RNA and/or protein compared to unmodified myoblast cells.

[0269] In some embodiments, determining the genotype of the offspring is performed by a PCR-based method and/or by DNA sequencing. Suitable methods are known in the art.

[0270] In some embodiments, the genetically modified non-human animal produced by the method of the invention is heterozygous for the genetic modification that results in myoblast cells in said animal expressing an increased amount of Cytor RNA and/or decreased amount of Tead1 RNA and/or protein compared to unmodified myoblast cells.

[0271] In some embodiments, the genetically modified non-human animal produced by the method of the invention is homozygous for the genetic modification that results in myoblast cells in said animal expressing an increased amount of Cytor RNA and/or decreased amount of Tead1 RNA and/or protein compared to unmodified myoblast cells.

[0272] Producing non-human animals that are homozygous for the genetic modification that results in myoblast cells in said animal expressing an increased amount of Cytor RNA and/or decreased amount of Tead1 RNA and/or protein compared to unmodified myoblast cells may be done by mating together non-human animals that are heterozygous for the genetic modification and identifying (e.g. by PCR-based genotyping) amongst the offspring of such a mating those animals that are homozygous for the genetic modification.

[0273] Thus, in some embodiments, the method of producing (or generating) a genetically modified non-human animal of the invention further comprises steps of identifying non-human animals produced as being heterozygous for the genetic modification in accordance with the invention, mating such heterozygous non-human animals together, and identifying offspring from said mating that are homozygous for the genetic modification in accordance with the invention. Such a method thereby produces a genetically modified non-human animal in accordance with the invention that is homozygous for the genetic modification in accordance with the invention.

[0274] The modified (e.g. genetically-modified) non-human animal of the invention may be a domesticated or farmed animal, e.g. livestock (such as poultry, pigs, cattle, sheep or goats) or farmed fish (e.g. salmon, tilapia or tuna).

[0275] In a further aspect, the invention provides an in vitro method for producing muscle fibres (e.g. type II myotubes or comprising type II myotubes) comprising culturing modified myoblasts which have increased amounts of Cytor RNA and/or decreased amount of Tead1 RNA and/or protein in comparison to unmodified myoblasts under conditions suitable to produce muscle fibres.

[0276] In some embodiments, the modified myoblasts have been administered (e.g. contacted with) a Cytor agonist and/or a Tead1 antagonist as defined above. In some embodiments, the Cytor agonist and/or a Tead1 antagonist is a gene therapy.

[0277] Thus, in some embodiments, the modified myoblasts have been genetically-modified to increase the expression of Cytor RNA and/or decrease the expression of Tead1 RNA and/or protein.

[0278] Any suitable method of genetically-modifying the myoblasts to have increased Cytor RNA and/or decreased Tead1 RNA and/or protein may be used to produce the modified myoblasts. For instance, the endogenous Cytor promoter or enhancer may be modified or replaced to increase Cytor expression, e.g. the promoter or a part thereof, may be replaced with a heterologous promoter that results in increased expression of Cytor. Similarly, the endogenous Tead1 promoter or enhancer may be modified or replaced to decrease Tead1 expression, e.g. the promoter or a part thereof, may be replaced with a heterologous promoter that results in decreased expression of Tead1. In a further representative embodiment, the myoblasts may be modified to include in its genome one or more additional copies of the Cytor gene and/or modified to mutate the Tead1 gene, so that a decreased amount of Tead1 RNA and/or protein is expressed. It is also possible to add one or more additional copies of the Cytor gene via an expression vector that result in the ectopic expression of Cytor. Ectopic expression refers to the occurrence of gene expression in a tissue in which it is normally not expressed and this may be achieved, for example, by placing the one or more additional copies of the Cytor gene under the control of tissue-specific promoter.

[0279] In some embodiments, the genetically-modified myoblasts are obtained indirectly. For instance, pluripotent stem cells (e.g. non-human cells) may be genetically-modified and subsequently cultured to produce myoblast cells that contain the genetic modification.

[0280] Thus, in some embodiments, the modified myoblasts comprise in their genome (e.g. stably integrated into their genome), and are capable of expressing, one or more (e.g. one or two) nucleotide sequences encoding Cytor (as defined elsewhere herein), preferably wherein one nucleotide sequence is operably linked to a heterologous regulatory sequence (e.g. promoter). In some embodiments, the heterologous regulatory sequence (e.g. promoter) is a tissue-specific or cell-specific promoter, e.g. a muscle-specific (e.g. skeletal muscle-specific) or myoblast-specific promoter as defined above.

[0281] Methods of generating genetically-modified myoblasts are well-known in the art and any suitable method may be used in the methods of the invention.

[0282] In some embodiments, method may involve introducing a vector comprising a nucleotide sequence encoding Cytor (as defined herein), wherein the vector is capable of transfecting or transducing a cell (e.g. myoblast), such that the cell or a myoblast cell derived therefrom expresses the Cytor RNA.

[0283] The vector may be a non-viral vector such as a plasmid. Plasmids may be introduced into cells (e.g. myoblasts) using any well-known method of the art, e.g. using calcium phosphate, liposomes, or cell penetrating peptides (e.g. amphipathic cell penetrating peptides).

[0284] The vector may be a viral vector, as described above, such as a retroviral, e.g. a lentiviral vector or a gamma retroviral vector.

[0285] Vectors suitable for delivering nucleic acids for expression in mammalian cells are well-known in the art and any such vector may be used. Vectors may comprise one or more regulatory elements, e.g. a promoter, such as a tissue- or cell-specific promoter as defined above.

[0286] Delivery systems are also available in the art which do not rely on vectors to introduce a nucleic acid molecules into a cell, for example, systems based on transposons, CRISPR/TALEN delivery and mRNA delivery. Any such system can be used to deliver a nucleic acid molecule into a cell according to the present invention.

[0287] In a further aspect, the invention provides meat or a meat-containing product derived or obtained from the modified non-human animal of the invention.

[0288] In another aspect, the invention provides muscle fibres and/or meat produced by the in vitro method of the invention.

[0289] It will be evident that the in vitro method of the invention advantageously may be used to provide muscle fibres and/or muscle tissue for use in therapy, e.g. in transplants, and this use forms a further aspect of the invention. Thus, in some embodiments, the modified myoblasts may be human or non-human animal myoblasts.

[0290] However, in some embodiments, muscle fibres and/or meat produced by the in vitro method of the invention may be for human or non-human animal consumption. Accordingly, in these embodiments, the myoblasts are non-human animal myoblasts, such as myoblasts from a domesticated or farmed animal, e.g. livestock (such as poultry, pigs, cattle, sheep or goats) or farmed fish (e.g. salmon, tilapia or tuna).

[0291] Meat products or meat-containing products of the invention (i.e. non-human meat) may include processed meat products, which may be for human or non-human animal consumption, e.g. pet food. The meat may be combined with other components, e.g. fats, oils, lipids, carbohydrates, protein supplements, fibre etc. to obtain a meat product or meat-containing product suitable for consumption.

[0292] As discussed above, the inventors have identified a cis-eQTL that is involved in the regulation of Cytor expression. Accordingly, the inventors propose that this cis-eQTL may find utility in various diagnostic and prognostic tests relating to muscle mass and muscle function, particularly type II muscle fibre mass and function.

[0293] Accordingly, in a further aspect, the invention provides a method of genotyping a subject (i.e. a human subject) for the cis-eQTL rs74360724, i.e. determining whether the subject is homozygous for the G allele or A allele, or heterozygous, and/or cis-eQTL rs 79200838, i.e. determining whether the subject is homozygous for the C allele or T allele, or heterozygous.

[0294] More particularly, the invention provides a method for determining the risk of developing skeletal muscle atrophy (e.g. sarcopenia) in a subject comprising determining the genotype of the subject at the cis-eQTL rs74360724, wherein when the subject is heterozygous or homozygous for the G allele they have an increased risk of developing muscle atrophy (e.g. sarcopenia) compared to a subject that is homozygous for the A allele, and/or at the cis-eQTL rs79200838, wherein when the subject is heterozygous or homozygous for the T allele they have an decreased risk of developing muscle atrophy (e.g. sarcopenia) compared to a subject that is homozygous for the C allele.

[0295] In another aspect, the invention provides a method for predicting the performance of a subject in an activity associated with fast-twitch muscle (e.g. an athlete, e.g. a sprinter) comprising determining the genotype of the subject at the cis-eQTL rs74360724, wherein when the subject is heterozygous or homozygous for the A allele they have an increased likelihood of outperforming a subject that is homozygous for the G allele, and/or at the cis-eQTL rs79200838, wherein when the subject is heterozygous or homozygous for the C allele they have an decreased of outperforming a subject that is homozygous for the T allele.

[0296] In a still further aspect, the invention provides a method for predicting the capability of a subject to produce fast-twitch muscle comprising determining the genotype of the subject at the cis-eQTL rs74360724, wherein when the subject is heterozygous or homozygous for the A allele they have an increased capability of producing fast-twitch muscle compared a subject that is homozygous for the G allele, and/or at the cis-eQTL rs79200838, wherein when the subject is heterozygous or homozygous for the C allele they have an decreased capability of producing fast-twitch muscle compared a subject that is homozygous for the T allele.

[0297] Methods of genotyping subjects are well-known in the art and any suitable method may be used in the methods described above. In some embodiments, the method involves isolating genomic DNA from a sample obtained from the subject, e.g. a cell containing sample such as a blood sample, cheek swab etc. and analysing the DNA to determine the genotype, e.g. using PCR-based methods.

[0298] The invention will now be further described with reference to the following non-limiting Examples and Figures in which:

[0299] FIG. 1 shows (A) a volcano plot of differentially expressed lncRNAs in human vastus lateralis 3 h after one bout of leg extension exercise (GSE71972; n=8 humans per group); and (B) CYTOR mRNA levels at several timepoints after electrical pulse stimulation in differentiated human skeletal myotubes (n=4 replicates). All data show mean±SEM. *P<0.05, ****P<0.0001 two-way ANOVA (B).

[0300] FIG. 2 shows (A)-(C) Cytor mRNA expression after incremental uphill treadmill exercise in rat (A) vastus lateralis, (B) soleus and (C) left ventricle (n=6-8 rats per group); and (D) Cytor mRNA in skeletal muscle and left ventricle of rats inbred (34 generations) for low- (LCR) and high-aerobic running (HCR) capacity (n=6-8 rats per group). All data show mean±SEM. *P<0.05, **P<0.01 Student's two-tailed t test.

[0301] FIG. 3 shows (A) Cytor mRNA expression upon exercise training in skeletal muscle of C57BL/6JRj and DBA/2J mice strains (n=4 mice per group); and (B) CYTOR mRNA levels at several time points after electrical pulse stimulation in differentiated mouse C2C12 myotubes (n=3 replicates). All data show mean±SEM. *P<0.05, ****P<0.0001 two-way ANOVA.

[0302] FIG. 4 shows (A) Cytor expression in differentiated C2C12 myotubes 24 h after transfection of a scramble Gapmer (Scramble Control) or a Gapmer targeting Cytor (Gap05a, Gap05e) (n=6 per group); (B) Normalized gene expression of muscle structure genes in control versus Cytor-deficient C2C12 myotubes (n=4 replicates per group); and (C) Gene expression upon Gapmer-mediated knockdown (Gap05a) of Cytor in C2C12 cells (n=5 per group). All data show mean±SEM. **P <0.01, ***P<0.001 Student's two-tailed t test.

[0303] FIG. 5 shows (A-B) normalized gene expression in differentiating (A) C2C12 myoblasts and (B) human primary myoblasts (n=3-6 replicates per group). All data show mean±SEM. *P<0.05, **P<0.01, ****P<0.0001 Student's two-tailed t test.

[0304] FIG. 6 shows (A) Cytor expression in Soleus (n=10) and EDL (n=8) muscles in mice (GSE112716) representing type I and type II muscle, respectively; (B) Quantification of myotube area (left) and myofusion index (right) calculated as fraction of nuclei present within myotubes in Cytor knockdown C2C12 (n=6 replicates); and (C) Gene expression of C2C12 Myotube thickness of horse serum differentiated C2C12 myotubes 48 h after Gapmer-mediated Cytor knockdown (n=6 per group). All data show mean±SEM. *P<0.05, **P<0.01, ****P<0.0001 Student's two-tailed t test.

[0305] FIG. 7 shows (A) Myotube area, (B) Myofusion index and (C) normalized gene expression of differentiating C2C12 myoblasts upon Cytor knockdown (n=6 replicates per group); (D) Quantification of myotube area (left) and myofusion index (right) calculated as fraction of nuclei present within myotubes in Cytor overexpressing C2C12 cells; and (E) Myotube thickness of C2C12 myoblasts after spCRISPRa mediated Cytor overexpression (n=3-4 per group). All data show mean±SEM. *P<0.05, **P<0.01, ***P<0.001, ****P<0.0001 Student's two-tailed t test.

[0306] FIG. 8 shows (A—top) Gene expression of C2C12 myotubes transfected with scramble control or Gap05 (fig. S2G) to knockdown Cytor (n=6); (A—bottom) Gene expression of C2C12-spdCas9-VP64-MPH expressing myoblasts transfected with gRNA4 to overexpress Cytor (bottom, n=6); and (B) Phosphofructokinase activity in control versus Cytor knockdown or Cytor overexpressing C2C12 myoblasts. All data show mean±SEM. *P<0.05, **P<0.01, ***P<0.001, ****P<0.0001 Student's two-tailed t test.

[0307] FIG. 9 shows results relating to experiments in which right and left gastrocnemius muscle of 3 mo old mice injected with a scramble control or Gap05a to knockdown Cytor (n=9 mice per group). 18 mo mice were intramuscularly injected with adeno associated virus containing empty vector sadCas9-VP64-U6 or sadCas9-VP64-U6-gRNA3 (n=8-10 mice per group). (A) mRNA transcript abundance of Cytor, Myhc-I (Myh7), Myhc-IIa (Myh2) and Myhc-IIb (Myh4) in gastrocnemius muscle of 3 mo and 24 mo non-injected mice (n=7-8 mice per group); (B-D) normalized gene expression of slow- and fast myosin isoforms and Cytor in mouse (B) Gastrocnemius, (C) EDL and (D) Soleus muscle. All data show mean±SEM. *P<0.05, **P<0.01, ***P<0.001, ****P<0.0001 Student's two-tailed t test (A). ****P<0.0001 two-way ANOVA (H). *P<0.05, **P<0.01 (B-D).

[0308] FIG. 10 shows (A) Expression of genes encoding type I and type II muscle

[0309] fibers in human skeletal muscle from young (n=8 humans) and old females (n=11 humans) (GSE25941); (B) Cytor expression in gastrocnemius muscle and (D) body weight of 5 months-old mice intramuscularly injected with a scramble control Gapmer or a Gapmer targeting Cytor (n=9 mice per group) and in 24 mo old mice intramuscularly injected with a non-targeting AAV-sadCas9-VP64-U6-gRNA (n=8 mice) or AAV-sadCas9-VP64-U6-gRNA3 targeting the promoter of Cytor (n=8-10 mice per group); and (C) Gastrocnemius muscle weight from hindlimb (n=8-10 mice per group). All data show mean±SEM. *P<0.05, **P<0.01, ***P<0.001, ***P<0.0001 Student's two-tailed t test.

[0310] FIG. 11 shows (A) Hindlimb grip strength (n=8-10 mice per group); (B) maximal uphill (10⁰) running distance (n=8-10 mice per group); (C) Quantification of average fiber minimal feret diameter (n=6 mice per group); and (D) proportion of muscle fibers presenting centralized nuclei (n=6 mice per group). All data show mean±SEM. *P<0.05, **P<0.01, ***P<0.001, ***P<0.0001 Student's two-tailed t test.

[0311] FIG. 12 shows (A) Quantification of distribution of type II muscle fibers stained for laminin, Myhc-I (Myh7), Myhc-IIa (Myh2) and Myhc-IIb (Myh4) in gastrocnemius muscle (n=6 mice per group); (B) phosphofructokinase activity of 5 months-old mice intramuscularly injected with a scramble control Gapmer or a Gapmer targeting Cytor (n=9 mice per group) and in 24 mo old mice intramuscularly injected with a non-targeting AAV-sadCas9-VP64-U6-gRNA (n=8 mice) or AAV-sadCas9-VP64-U6-gRNA3 targeting the promoter of Cytor (n=8-10 mice per group); (C) Quantification of Sirus red and CD45 staining of 5 months-old mice intramuscularly injected with a scramble control Gapmer or a Gapmer targeting Cytor (n=6 mice per group); and (D) normalized gene expression in 24 mo old mice intramuscularly injected with a non-targeting AAV-sadCas9-VP64-U6-gRNA (n=8 mice) or AAV-sadCas9-VP64-U6-gRNA3 targeting the promoter of Cytor (n=10 mice per group). All data show mean±SEM. *P<0.05, **P<0.01, ***P<0.001, ***P<0.0001 Student's two-tailed t test. ****P<0.0001 two-way ANOVA (B).

[0312] FIG. 13 shows (A) Renilla-normalized luciferase activity in human skeletal muscle myoblasts expressing the pGL3-Promoter vector without (EV) or with a 25 bp fragment surrounding the putative CYTOR enhancer elements rs74360724, rs74924495, rs72624662 (n=7-8 replicates per variant); (B) Chromatin immunoprecipitation of H3K9me3 followed by qPCR amplification of rs74924995, rs72624662 and rs74360724 in human primary myoblasts co-expressing dCas9-KRAB-MeCP2 with an empty vector guide RNA or a gRNA targeting the indicated genomic regions (n=4 replicates per group); (C) CYTOR expression in human skeletal muscle myoblasts expressing dCas9-KRABMeCP2 and an empty vector gRNA (EV) or a gRNA targeting the putative CYTOR enhancer elements rs74360724, rs74924495, or rs72624662 (n=4 replicates per variant); (D) Normalized CYTOR gene expression in human primary myoblasts expressing Cas9 (EV), or Cas9-gRNAs flanking rs74360724 (n=6 replicates per group). All data show mean±SEM. *P<0.05, **P<0.01, ***P<0.001 Student's two-tailed t test.

[0313] FIG. 14 shows (A) CYTOR expression in human myoblasts from 21 donors of different ages and genotypes for rs74360724 (n=5 GG, n=11 GA, n=5 AA); (B) Chromatin immunoprecipitation of H3K27me3 followed by qPCR of rs74360724 in human primary myoblasts from donors homozygous for GG or AA at rs74360724; (C) Effect of rs74360724 on CYTOR skeletal muscle mRNA from the human GTEx project and performance in 6-min walk test in aged individuals from the Helsinki Birth Cohort Study (HBCS) (n=706 humans for mRNA expression; n=429 humans for 6-min walk test). All data show mean±SEM. *P<0.05 two-way ANOVA.

[0314] FIG. 15 shows (A) Quantification of stained mature myotubes of aged human myoblasts (76 years) expressing spdCas9-VP64 without (EV gRNA) or with a gRNA (OE gRNA3; OE gRNA4) to overexpress CYTOR endogenously: myotube area (n=4 replicates); and (B) Gene expression of type I and type II myosin isoforms in aged human myoblasts (76 years) expressing spdCas9-VP64 without (EV gRNA) or with a gRNA (OE gRNA3; OE gRNA4) to overexpress CYTOR endogenously. All data show mean±SEM. *P<0.05, **P<0.01, Student's two-tailed t test.

[0315] FIG. 16 shows (A) Movement (n=38 CYTOR −, n=68 CYTOR +), (B) maximum speed (n=42 CYTOR −, n=72 CYTOR +), (C) minimum speed (n=42 CYTOR −, n=72 CYTOR +), (D) fraction of active worms (n=42 CYTOR −, n=72 CYTOR +), (E) fraction of paralyzed worms (n=10 worms per group) and (F) fraction of dead worms (n=10 worms per group) at day 15 in N2 C. elegans strains without (CYTOR −) or with (CYTOR +) incorporation of human CYTOR DNA under the muscle-specific promoter myo3p. All data show mean±SEM. ***P<0.001, ****P<0.0001 Student's two-tailed t test.

[0316] FIG. 17 shows (A) Cytor expression in C2C12 myoblasts stably expressing spdCas9-VP64-gRNA4; and (B) Changes in ATACseq signal (left, n=4 replicates per group), Tead1 occupancy (middle, n=4 replicates per group), and gene expression (right, n=6 replicates per group) in C2C12 overexpressing Cytor. All data show mean±SEM. *P<0.05, **P<0.01, ***P<0.001, ****P<0.0001 Student's two-tailed t test.

[0317] FIG. 18 shows (A) Normalized Tead1 gene expression in Cytor overexpressing C2C12 cells transiently transfected with a Tead1- or GFP-expressing plasmid (left) and Tead1 expression in empty vector control C2C12 cells transiently transfected with a scramble siRNA or siRNA against Tead1 (right) (n=6 replicates per group); (B) Quantification of myotube area and (C) myofusion index of C2C12 myoblasts overexpressing Cytor alone, together with Tead1, or C2C12 myoblasts treated with siRNA against Tead1 or Verteporfin (n=6 replicates); and (D) Gene expression in C2C12 myoblasts overexpressing Cytor alone, together with Tead1 or treated with siRNA against Tead1 or Verteporfin (n=6 replicates). All data show mean±SEM. *P<0.05, **P<0.01, ***P<0.001, ****P<0.0001 Student's two-tailed t test.

[0318] FIG. 19 shows (A) Movement (n=51 Con-EV, n=48 siRNA egl-44, n=48 Con-DMSO, n=47 Verteporfin), (B) maximum speed (n=51 Con-EV, n=48 siRNA egl-44, n=48 Con-DMSO, n=47 Verteporfin), (C) minimum speed (n=51 Con-EV, n=48 siRNA egl-44, n=49 Con-DMSO, n=54 Verteporfin) (D) fraction of active worms (n=48 Con-EV, n=51 siRNA egl-44, n=48 Con-DMSO, n=47 Verteporfin) (E) fraction of paralyzed worms (n=6 replicates per group) and (F) fraction of dead worms (n=6 replicates per group). All data show mean±SEM. *P<0.05, **P<0.01, ***P<0.001, ****P<0.0001 Student's two-tailed t test.

[0319] FIG. 20 shows (A) Allelic effect of the variant rs79200838 on TEAD1 expression in the Genotype-Tissue Expression (GTEx) database (n=553 for CC; n=31 for CT), (B) phenotype association of rs79200838 in the UK biobank, (C) effect size and p-value of the TEAD1 expression-reducing T-allele at rs79200838 for the top 6 affected phenotypes in the UK biobank.

### EXAMPLES

### Example 1: Exercise Alters Expression of lncRNAs in Skeletal Muscle

[0320] To discover lncRNAs potentially having major impact on skeletal muscle function, we analyzed differentially expressed lncRNAs after single-leg knee-extension exercise in an extant human skeletal muscle dataset (GSE71972) and identified several lncRNAs differentially expressed after exercise (FIG. 1A). When ranking these lncRNAs based on their responsiveness to exercise in both effect size and statistical significance, the lncRNA with highest responsiveness to exercise was identified to be CYTOR (Table 1).

TABLE 1
IncRNAs altered by exercise in human skeletal muscle

| | q-value | log2FC | q-value | log2FC | Average | Average | Average |
|---|---|---|---|---|---|---|---|
| IncRNA | Kallisto | Kallisto | STAR | STAR | log2FC | q-value | Rank |
| CYTOR | 2.41E−03 | 3.0126 | 1.91E−03 | 2. [symbol] 141 | 2.9134 | 2.16E−03 | 3 |
| SNHG15 | 9.00E−04 | 1.6749 | 5.32E−04 | 1.6571 | 1. [symbol] 0 | 7.16E−04 | 4 |
| MIR4435-2HG | 7.18E−03 | 2.5770 | 8.64E−04 | 1.9771 | 2.2770 | 4.02E−03 | 5.5 |
| CTD-3252C9.4 | 1.54E−04 | 0.92 [symbol] 3 | 3.5 [symbol] E−03 | 1.0181 | 0.9732 | 1. [symbol] 7E−03 | 5.5 |
| RP11-309L24.4 | 9.73E−04 | 5.0435 | 1. [symbol] E−02 | 3.0152 | 4.0293 | 9.77E−03 | 6.5 |
| MIR222HG | 3.0 [symbol] E−03 | 2.5740 | 1.07E−02 | 2.2389 | 2.4065 | [symbol] E−03 | 6.5 |
| LUCAT1 | [symbol] .16E−03 | 5.5184 | 2.23E−02 | 4.1693 | 4.8438 | 1.52E−02 | 7 |
| AC058791.1 | 8.62E−03 | 2.2 [symbol] 28 | 5.37E−03 | 1. [symbol] 900 | 2.0864 | [symbol] .99E−03 | 8 |
| RP1-206D16.6 | 9.18E−03 | 1.5 [symbol] 23 | 9.28E−04 | 1.7 [symbol] 00 | 1. [symbol] 562 | 5.05E−03 | 8 |
| BPGBPG55C20.2 | 8.78E−04 | −0.8229 | 5.37E−03 | −0.8084 | −0.8156 | 3.13E−03 | 8.5 |
| MIR22HG | 4.05E−03 | 0.843 [symbol] | 5.37E−03 | 0.9279 | 0. [symbol] 857 | 4.71E−03 | 9.5 |
| RP11-159D12.2 | 8.78E−04 | −0.9 [symbol] 03 | [symbol] .26E−03 | −0.8460 | −0.9032 | 3. [symbol] 7E−03 | 9.5 |
| NEAT1 | 1.04E−02 | 0.6134 | 1. [symbol] 7E−02 | 1.1928 | 0.9031 | 1.4 [symbol] E−02 | 11.5 |
| ZNF674-AS1 | 4.90E−02 | 0.9343 | 1.07E−02 | 0.9641 | 0.9492 | 2.9 [symbol] E−02 | 12.5 |
| CYP4F35P | 2.59E−02 | −1.1637 | 1. [symbol] 7E−02 | −0.9028 | −1.0332 | 2.23E−02 | 14.5 |

[symbol]

indicates data missing or illegible when filed

[0321] Increased CYTOR expression upon resistance exercise, and to some degree upon endurance exercise was confirmed in a range of public available datasets. CYTOR has been linked to breast, gastric, and colon cancers and possesses a second copy in the human genome (MIR4435-2HG), which was more recently described as Morrbid. CYTOR is not in close proximity (>100 kb) to other genes and shows nucleotide conservation in mice (annotated as Gm14005) and rats (annotated as XR_146885.3), yet there is no previous literature on the role of CYTOR/Cytor in muscle physiology. Electrical pulse stimulation (EPS) to model exercise in cells, confirmed CYTOR upregulation in human muscle cells (FIG. 1B) suggesting that the induction of CYTOR by exercise is regulated in a cell autonomous manner. RNA fluorescence in situ hybridization (RNA-FISH) in human myoblasts revealed CYTOR to be mainly localized in the nucleus. This was confirmed by subcellular fractionation experiments in mouse myoblasts.

[0322] Given the presence of Cytor homologues in rats and mice, we tested whether the exercise-responsiveness of Cytor is also conserved in these species. Indeed, Cytor mRNA levels were found to be increased in rat vastus lateralis (FIG. 2A) and soleus (FIG. 2B) after exercise, but not in the left ventricle of the heart (FIG. 2C), suggesting a skeletal muscle-specific induction of Cytor upon exercise. Moreover, inbreeding rats for high vs low aerobic exercise capacity for 34 generations selectively enriched CytormRNA in skeletal muscle of high capacity runners (HCR) compared to low capacity runner (LCR), while no difference was detected in the left ventricle (FIG. 2D).

[0323] We next assessed the responsiveness of Cytor to exercise in mice. Following exercise, Cytor levels were increased in mouse skeletal muscle independently of genetic background (C57BL/6JRj or DBA/2J) (FIG. 3A). Increased post-exercise Cytor levels most likely originated from muscle cells as Cytor was found to be elevated also in cultured mouse skeletal muscle cells (myotubes) after EPS (FIG. 3B). The BXD cohort is a recombinant inbred mouse population with substantial genetic heterogeneity, presenting a useful resource to study correlations between phenotypes and tissue gene expression. Skeletal muscle of different BXD mouse strains showed considerable variation in Cytor expression, which was not affected by diet. Interestingly, Cytor expression in the BXD cohort correlated positively and robustly with various exercise phenotypes in chow and high fat diet fed mice. Taken together, these results demonstrate that exercise increases the expression of the lncRNA Cytor with potentially positive functions in skeletal muscle.

### Example 2: Cytor Promotes Myogenic Differentiation

[0324] To investigate the role of Cytor RNA in skeletal muscle physiology, we knocked down Cytor using the potent antisense oligonucleotide (Gapmer), Gap05a, in C2C12 myotubes (FIG. 4A) and performed RNA sequencing. Transcriptome analysis revealed that Cytor knockdown led to reduced expression of genes encoding structural proteins of skeletal muscle (FIG. 4B). Expression of genes flanking Cytor remained unaltered, indicating that Cytor does not regulate its neighbouring genes in skeletal muscle (Bcl2l11 and Anapc1; FIG. 4C).

[0325] To explore the global effects of Cytoron skeletal muscle transcriptome, we conducted gene set enrichment analysis of the transcriptome data. Myogenesis (M5909) was the most downregulated pathway in Cytor diminished myotubes. Consistently, the myogenesis pathway (M5909) was also among the strongest correlated pathways with CYTOR in human skeletal muscle biopsies from Genotype Tissue Expression Project (GTEx) database. In line with this finding, Cytor/CYTOR expression increased during mouse and human myoblast differentiation (FIG. 5A-B). Surprisingly, type II myosin isoforms (Myh4, My/i) were more affected by Cytor knockdown than genes encoding slow twitch type I fibers (Myh7, My/3). Similarly, CYTOR mRNA levels in human skeletal muscle correlated significantly with genes encoding type II, but not with type I muscle fibers. In extensor digitorum longus (EDL), consisting predominantly of type II muscle fibers, Cytor displayed also higher expression compared to soleus, composed mostly of type I muscle fibers (GSE112716) (FIG. 6A), raising the hypothesis that Cytor might be involved in regulation of muscle fiber types.

[0326] To investigate the possibility that Cytor might affect myoblast differentiation, we altered its expression in C2C12 cells and evaluated cell morphology and gene expression patterns. Knockdown of Cytor in C2C12 myotubes decreased myotube area, reduced the number of nuclei present per myotube (FIG. 6B), and myotube diameter (FIG. 6C). Cytor knockdown in C2C12 myoblasts also reduced the differentiation ability of myoblasts (FIG. 7A-C). Progress in CRISPR-Cas9 technology has provided the opportunity to endogenously upregulate gene expression by epigenetic alterations without cutting DNA (sp-CRISPRa). We harnessed this nuclease-deficient Cas9 technology from Streptococcus pyogenes (spdCas9) to create a C2C12 cell line stably expressing spdCas9 together with the transcriptional activators VP64, MS2, P65 and HSF1. To endogenously overexpress Cytor we additionally introduced the single best performing guide RNA (gRNA) or a combination of gRNAs (gRNApool) targeting the promoter of Cytor. sp-CRISPRa-mediated overexpression of Cytor in C2C12 myoblasts reduced myoblast proliferation, and enhanced myotube differentiation manifested by increased myotube area (FIG. 7D left), elevated number of nuclei present per myotube (FIG. 7D right), and thicker myotube diameter (FIG. 7E) in Cytor overexpressing cells compared to controls. These results were consistent with different genetic constructs either silencing (Gapmers Gap05a, Gap05e) or overexpressing (guide RNAs gRNA4, gRNApool) Cytor, implying that the observed effects were unlikely due to off-target events (FIGS. 6B and 7D). In addition, gene expression profiling revealed Cytor to regulate expression of type II myosin isoforms (FIG. 8A). This regulation was confirmed by phosphofructokinase activity (FIG. 8B), which is more prevalent in type II muscle fibers. While Cytor was indispensable for type II myotube maintenance (FIG. 6B and FIG. 8A) and specification (FIG. 7A-C), Cytor overexpression directed myogenic differentiation towards type II myosin isoforms, thereby underscoring its role in deciding myoblast differentiation fate. Overall, our findings in vitro implicate a significant role for Cytor in promoting myogenesis and suggest a myoblast differentiation bias towards type II muscle fibers.

### Example 3: Bidirectional Cytor Gene Manipulation Alters Muscle Morphology and Function In Vivo

[0327] Deterioration of type II muscle fibers in size and number is a hallmark of ageing. Therefore, we examined the hypothesis that Cytor is involved in pathophysiogical muscle alterations inflicted by ageing. Indeed, Cytor expression was reduced upon ageing in mouse skeletal muscle, which was accompanied by reduced expression of the type II myosin heavy chain genes Myhc-IIa (Myh2) and Myhc-IIb (Myh4), but not the type I Myhc-I (Myh7) (FIG. 9A), particularly in the predominant type II muscles Gastrocnemius and EDL (FIG. 9B-D). Ageing-induced reduction of type II, but not type I fibers, was confirmed in humans in a publicly available microarray data set (GSE25941) (FIG. 10A) and has previously been reported in humans and rodents.

[0328] We next evaluated the effect of bidirectional Cytor gene manipulation on gastrocnemius muscle function and morphology in young and old mice. While Gapmer injections in gastrocnemius muscles of both hindlimbs were used to knockdown Cytor in young mice, the large size of Streptococcus pyogenes derived dCas9 (spdCas9), which was used in cells, presents a major challenge to activate endogenous gene expression in vivo as it exceeds the genome-packaging capacity of AAVs. To overcome this limitation, we switched to the catalytically inactive Cas9 protein derived from Staphylococcus aureus (sadCas9) fused to the transcriptional activator VP64 and a gRNA (sa-CRISPRa), which we were able to package into AAV9. Hence, to overexpress Cytor in aged mice, AAV9 carrying sa-CRISPRa including a gRNA, which we tested in C2C12 cells beforehand was injected intramuscularly in both gastrocnemius muscles of 18-months-old mice.

[0329] Cytor knockdown in gastrocnemius of young mice led to approximately 50% reduction in Cytor expression (FIG. 10B), resulting in a reduction of gastrocnemius muscle mass by 29% (FIG. 10C) without changing body weight (FIG. 10D). Functionally, knockdown of Cytor in young mice impaired hindlimb grip strength (FIG. 11A), and uphill running performance (FIG. 11B). Morphologically, Cytor knockdown in young mice reduced muscle fiber diameter (FIG. 11C), increased number of centralized nuclei (FIG. 11D), and reduced the proportion of type II myofibers (FIG. 12A and FIG. 12B). These findings were accompanied by increased inflammation and fibrosis (FIG. 12C). Our findings indicate that Cytor is indispensable for normal muscle maintenance, and young muscles lacking normal Cytor expression display features of ageing muscle, such as reduction of type II muscle fiber proportion.

[0330] Importantly, intramuscular injection of AAV9-sadCas9-VP64-U6-gRNA3 (sa-CRISPRa) in gastrocnemius muscle recovered the age-related reduction in Cytor expression at the age of 24 mo, and rescued ageing-associated loss of muscle mass (FIG. 10C) without changing body weight (FIG. 10D). Moreover, Cytor overexpression in gastrocnemius muscles ameliorated the ageing-induced decline in hindlimb grip strength (FIG. 11A) and uphill running performance (FIG. 11B). Gastrocnemius muscle fiber diameter in aged mice increased upon Cytor overexpression (FIG. 11C), possibly contributing to the increased muscle mass (FIG. 10C). Ageing-induced centralized nuclei only showed a trend for reduction (FIG. 11D) after Cytor overexpression. These improvements came along with a recovery of the age-associated decline in the proportion of type II muscle fibers (FIG. 12A), which was further confirmed by mRNA expression of specific muscle isoforms (FIG. 12D) and phosphofructokinase activity (FIG. 12B).

[0331] In summary, ageing attenuates Cytor levels in skeletal muscle and in vivo bidirectional gene manipulation of Cytor reveals that Cytor knockdown in skeletal muscle recapitulates functional and morphological hallmarks of a sarcopenic muscle, whereas recovering Cytor expression in aged muscle ameliorates the ageing-inflicted impairments in muscle mass and morphology.

### Example 4: A Skeletal Muscle Cis-eQTL Regulates CYTOR Expression

[0332] Next, we investigated the effect of genetic diversity on human CYTOR expression. To this end, we discovered 9 haploblocks within CYTOR (±50 kb), which contained several CYTOR cis-expression quantitative trait loci (cis-eQTLs) in human skeletal muscle biopsies from the GTEx database. The most significant cis-eQTLs were rs74924495, rs72624662 and rs74360724, located within a 12 kb region from each other. These SNPs were in high linkage disequilibrium with each other (r2>0.8) with minor allele frequencies 42-44%.

[0333] We next attempted to pinpoint the causal variant of these 3 SNPs representing the strongest cis-eQTLs. To delineate the causal variant of CYTOR expression from these 3 SNPs in human skeletal muscle, we performed several functional experiments.

[0334] First, we cloned each allele of the 3 SNPs (G and A for each SNP) into a luciferase plasmid, with total 7 plasmid constructs cloned (including one control plasmid without any insertion; EV). In human myoblasts, the 2 plasmids harboring the G and A alleles of rs74360724 displayed increased luciferase activity relative to plasmids harbouring rs74924495 and rs72624662 alleles (FIG. 13A), suggesting that the region around rs74360724 contains a CYTOR boosting cis-regulatory element. In addition, the minor A allele of rs74360724 increased luciferase expression more than the major G allele (FIG. 13A), which is in line with the dose-dependent effect of the rs74360724 alleles (GG, GA, AA) on CYTOR expression in human skeletal muscle in GTEx.

[0335] Second, using the recently optimized CRISPRi technology to induce heterochromatinization at promoters, we employed 3 gRNAs, each targeting the genomic region of the 3 SNPs, for epigenetic silencing of the putative regulatory elements using nuclease-deficient Cas9 (dCas9) fused to KRAB chromatin repressor domain and MeCP2 repressor protein (dCas9-KRAB-MeCP2). Introduction of dCas9-KRAB-MeCP2 into human myoblasts to silence the chromatin regions encompassing rs74924495, rs72624662 or rs74360724, increased H3K9me3 occupancy at these regions to a similar degree (FIG. 13B). However, only silencing rs74360724 resulted in reduced CYTOR expression despite being >80 kb away from the promoter (FIG. 13C), suggesting the presence of a putative CYTOR enhancer element. Enhancer elements are characterized by the presence of H3K27ac and H3K4me1 histone modifications. In human primary myoblasts, we found indeed an enrichment of these two histone modifications in the genomic region surrounding rs74360724. Furthermore, CRISPR/Cas9 mediated deletion of this enhancer element in human primary myoblasts reduced expression of CYTOR (FIG. 13D).

[0336] Third, to evaluate a physical interaction between the promoter of CYTOR and the cis-regulatory element harbouring rs74360724, the promoter of CYTOR was immunoprecipitated and tested for co-immunoprecipitation of this putative enhancer element. To this end, dCas9 fused to an HA-tag together with a non-targeting empty gRNA (EV), or a gRNA targeting the promoter of CYTOR was introduced into HEK293 cells. This strategy has been shown to identify enhancer-promoter interactions. To test whether our approach to tag the CYTOR promoter with HA was successful, we performed qPCR of the CYTOR promoter after chromatin immunoprecipitation of the HA tag. While neither the EV, nor IgG amplified the qPCR signal of the promoter of CYTOR, the HA-precipitated samples amplified the qPCR signal of the CYTOR promoter (P), validating that the HA-tag successfully labelled the promoter of CYTOR. Importantly, the putative enhancer (E) element harbouring rs74360724, but not the regions of rs74924495 or rs72624662, was pulled down together with the HA-tagged promoter of CYTOR, demonstrated by qPCR amplification of the putative CYTOR enhancer. Looping of the region adjacent to rs7436074 to the promoter of CYTOR was confirmed by the public available “Genehancer” tool. Collectively, these results implicate a cis-regulatory enhancer element in the regulation of CYTOR expression with carriers of rs74360724 (G->A) displaying elevated CYTOR levels in human skeletal muscle.

[0337] We next evaluated how electrical pulse stimulation (EPS), mimicking exercise in human myotubes, modulates CYTOR expression by measuring histone acetylation of the CYTOR promoter and the newly discovered enhancer region. Following EPS, induction of CYTOR mRNA was observed again, which coincided with H3K27 acetylation (H3K27ac) of the CYTOR promoter and the rs74360724 enhancer region, but not with the regions adjacent to rs74924495 or rs72624662, suggesting that activation of both promoter and enhancer might contribute to the increase in CYTOR expression upon exercise.

### Example 5: Elevated CYTOR Levels Enhance Fast-Twitch Myogenesis and Fitness in Ageing

[0338] To study whether rs74630724 affects CYTOR expression in a cell-autonomous manner, we measured CYTOR expression in human myoblasts from 21 different donors including young and old individuals, whom we genotyped for rs74630724. Similar to muscle tissue, the A allele of rs74360724 was associated with increased CYTOR expression in primary myoblasts (FIG. 14A), demonstrating a cell-autonomous effect of genetic regulation on CYTOR expression. Donors homozygous for the AA-allele also showed a trend for reduced H3K27me3 occupancy compared to GG donors (FIG. 14B). Notably, CYTOR expression in myoblasts from aged donors was reduced compared to young donors (FIG. 14A), confirming our findings in mice (FIG. 9A), and suggesting a conserved muscular dysregulation of CYTOR expression across human and mouse ageing.

[0339] Next, we hypothesized that individuals having the CYTOR-increasing A-allele of rs74360724 might be protected against the age-dependent decline in fitness. To this end, we employed the Helsinki Birth Cohort Study (HBCS), a well-characterized Finnish population cohort (n=2003) composed of aged (70.92±2.68 yo) individuals, to study the effects of CYTOR cis-eQTL rs74360724 on performance in 6-min walk test, which was shown to identify sarcopenic patients with limited mobility. The CYTOR expression boosting A allele (FIG. 14A) was associated with increased distance walked during 6 minutes (FIG. 14C), consistent with Cytor overexpression induced improvements in aged mice (FIGS. 11A and B). These findings indicate that elevated CYTOR levels translate into improved age-related fitness.

[0340] To experimentally investigate the direct genetic effect of CYTOR on human myoblast differentiation, a biological process potentially able to compensate for the loss of myofibers in age-related sarcopenia, we evaluated aged human myotube morphology upon CRISPR-dCas9 mediated genetic upregulation of CYTOR. Using spdCas9-VP64 together with gRNAs targeting the human CYTOR promoter we were able to successfully introduce sp-CRISPRa into human myoblasts and increase CYTOR expression endogenously. In human myoblasts derived from an aged (76y) donor, heterozygous for rs74360724, CYTOR overexpression reduced primary myoblast proliferation, and instead enhanced myoblast differentiation, evidenced by increased myotube area (FIG. 15A), improved myofusion index, and elevated markers of the type II myosin isoforms, MYL1 and MYH2, but not of the type I marker MYL3 (FIG. 15B). Our results were similar for two different gRNAs (FIG. 15A-B), strongly minimizing the possibility of off-target effects. Thus, artificial elevation of CYTOR levels in aged human myoblasts improved muscle morphology by enhancing myoblast differentiation into type II myotubes. Taken together, these data suggest that genetic manipulation of CYTOR could have therapeutic potential to promote type II muscle fibers in muscle diseases, such as sarcopenia.

### Example 6: CYTOR Rejuvenates Muscle Morphology and Function in Aged C. elegans

[0341] Finally, given the cross-species conservation of myogenesis, and to study the potential benefits of human CYTOR on systemic muscle function in an in vivo ageing model, human CYTOR DNA was cloned into C. elegans under control of the muscle-specific promoter myo3p. This strategy was chosen because C. elegans do not express CYTOR orthologues natively. Worms harbouring human CYTOR (CYTOR +(myo3p)) showed similar muscle morphology compared to their N2 wild-type littermates (CYTOR − (wt)) at young age (day 1). However, at old age (day 15), unlike their N2 controls, CYTOR expressing worms displayed better aligned, and less deteriorated muscle fibers, resembling skeletal muscle morphology of young worms. These morphological improvements translated into functional gains in movement at old age (FIG. 16A), as well as higher maximum (FIG. 16B) and minimum (FIG. 16C) speed when challenged to move. In addition, CYTOR expressing worms had increased mobility (FIG. 16D), reduced paralysis (FIG. 16E), and increased survival (FIG. 16F) at old age. Collectively, these data show that skeletal muscle-specific expression of human CYTOR in C. elegans rejuvenates muscle morphology and function at old age, thereby strengthening the notion that CYTOR is a novel key player in healthy muscle ageing and demonstrating the potency of human CYTOR.

### Example 7: Cytor Modifies Chromatin Accessibility at Tead1 Binding Sites

[0342] In order to identify potential mediators of Cytor's effect on myoblast differentiation and fiber type bias, we generated a C2C12 cell line constitutively overexpressing endogenous Cytor (Cytor-OE) (FIG. 17A). In this stable C2C12 cell line, Cytor overexpression again promoted myoblast differentiation. LncRNAs have been shown to exert effects on transcription regulation by chromatin alteration; this is in particular observed for lncRNAs retained in the nucleus. To investigate this possibility, we performed Assay for Transposase-Accessible Chromatin using sequencing (ATAC-seq) to compare chromatin accessibility in control versus Cytor-OE myoblasts. As expected, transposase digestion fragmented DNA and mapped peaks were distributed across the genome with most peaks localizing within distal intergenic regions (30.31%), promoters (23.31%), or other intronic regions (21.44%). The first principal component, explaining 46% of the variance, separated control from Cytor-OE myoblasts, suggesting that overexpression of Cytor indeed altered chromatin accessibility. Gene ontology of differentially accessible genes showed cell differentiation as one of the most enriched pathways upon Cytor-OE, which is in line with our mouse and human in vitro results. Indeed, among the 1559 differentially accessible genes, promoter accessibility of the structural muscle genes Utrn and Tnc was increased upon Cytor-OE. Of note, Tnc deficient mice have previously been shown to present selective atrophy of type II muscle fibers.

[0343] Performing de novo Hypergeometric Optimization of Motif EnRichment (HOMER) analysis on genomic areas which either lost or gained accessibility revealed several transcription factors with altered chromatin accessibility upon Cytor-OE. The Mef2 transcription factor, whose accessibility was reduced upon Cytor-OE, has previously been implicated in promoting type I muscle fibers. Reduced chromatin accessibility at Tead1 bindings sites upon Cytor overexpression also caught our attention, as Tead1 silencing has been shown to specifically promote type II muscle fibers in vitro and in vivo. Conversely, muscle-specific overexpression of Tead1 has been shown to reduce type II fibers. In line with the HOMER analysis, several direct Tead1 binding targets reported in C2C12 cells (Tef, Tcta, S/c29a1, Ndufa6) indeed lost chromatin accessibility upon Cytor-OE (FIG. 17B, left). Consistent with this, Tead1 occupancy at the promoters of these target genes was reduced (FIG. 17B, middle) and mRNA expression was reduced upon Cytor overexpression (FIG. 17B, right).

[0344] We reasoned that the differentiation-promoting effect of Cytor might be dependent on Tead1 and therefore co-overexpressed Tead1 in C2C12 cells stably overexpressing Cytor (FIG. 17A). Compared to Cytor-OE alone, overexpressing Tead1 together with Cytor (FIG. 18A) reduced myotube area (FIG. 18B), myofusion (FIG. 18C) and abolished expression type II myosin isoforms (FIG. 18D). No effect was observed on the expression of the type I myosin isoform (FIG. 18D). These data are in line with previous reports showing decreased type II fiber percentage upon Tead1 overexpression and suggest that Cytor's effect on myoblast differentiation into type II myotubes is dependent on excluding Tead1 binding to chromatin. In line with this notion, we observed that disruption of Tead1 function genetically with a specific siRNA targeting Tead1 (FIG. 18A) or pharmacologically using Verteporfin, a Tead1 inhibitor, was sufficient to increase myotube area (FIG. 18B), myofusion (FIG. 18C) and induce the expression of type II, but not type I, myosin isoforms (FIG. 18D), similarly to Cytor overexpression alone. These findings point towards Tead1 mediating at least part of Cytor's effect on myoblast differentiation into type II myotubes.

[0345] To assess whether Tead1 silencing was able to recapitulate the beneficial effect of Cytor in C. elegans in vivo, we silenced the Tead1 orthologue egl-44 or treated the worms with verteporfin and found that either strategy phenocopied the beneficial effect of Cytor in aged C. elegans both functionally and morphologically (FIG. 19A-F).

### Materials and Methods

[0346] Study design. The objective of this study was to identify lncRNAs altered by exercise in human skeletal muscle. Unbiased RNA profiling indicated the myogenesis pathway to be regulated by Cytor and all assays to measure myogenesis were reproduced in multiple animals. All animals used in the experiments were randomly assigned to experimental or control groups. Animals that showed signs of severity, predefined by the animal authorizations, were euthanized. These animals, together with those who died spontaneously during the experiments, were excluded from the calculations. These criteria were established before starting the experiments. All mouse phenotyping was performed blinded. Calculation of sample sizes for both cell and animal experiments were determined based on previous findings. For motility, fitness and death scoring experiments in C. elegans, sample size was estimated based on the known variability of the assay. Sample sizes, replicates, and statistical methods are specified in the figure legends.

[0347] Statistical analyses. Differences between two groups were assessed using two-tailed t tests. Differences between more than two groups were assessed by using one-way or two-way analysis of variance (ANOVA), unless stated otherwise. GraphPad Prism 6 (Prism) was used for statistical analyses. Variability in plots and graphs is presented as standard error mean (SEM). All p<0.05 were considered to be significant. *p<0.05; **p≤0.01; ***p≤0.001; ****p≤0.0001. Mouse experiments were performed once.

[0348] Rat studies. Female Sprague-Dawley rats (200-220 g) were used for the exercise study. Rats were exercised using an incremental protocol at 25 degrees incline starting at 6 m/min and increasing speed by 0.03 m/s every 2 min until exhaustion. Animals were sacrificed at 0 h, 1 h, 3 h, 6 h, and 24 h after exercise and vastus lateralis, soleus and left ventricle were excised and immediately snap frozen in liquid nitrogen. Another cohort of rats were inbred for low- or high running capacity for 34 generations. Soleus and left ventricle from these rats were excised and immediately snap frozen in liquid nitrogen for subsequent gene expression analyses. All rats were acclimatized to animal facilities for seven days prior to the experiments. Four animals were housed per cage (22° C.) with free access to standard chow and water. All experiments were approved by the Norwegian Animal Research Authority before the start of the project (FOTS #5829).

[0349] Mouse studies. Mouse chronic exercising was performed three times a week for 2 or 4 weeks before mice were sacrificed and gastrocnemius muscles were dissected and snapfrozen for biochemical analyses. Young (3-month-old) and aged (18-month-old) male C57Bl/6JRj mice were purchased from Janvier Labs. Body weight was measured before and after treatment. 3 mo mice were caged 4 animals/cage and bilaterally injected intramuscularly with 1.5 μg/g Gapmers (Exiqon, Qiagen) diluted in PBS at 0.8 ug/uL in gastrocnemius muscle 2 times a week for 6 weeks. 18 mo mice were single caged and bilaterally injected intramuscularly once with 1*10E¹¹ viral genomes (VG) in gastrocnemius. One week after phenotyping, left gastrocnemius muscles of 5 mo and 24 mo mice were rapidly removed, weighed and snap-frozen in liquid nitrogen while right gastrocnemius muscles were embedded for histological analyses. All animals were housed in micro-isolator cages in a room illuminated from 7:00 AM to 7:00 PM with ad libitum access to chow diet and water. All animal experiments were approved by the local authorities (Swiss Veterinary Office; 2890.1C).

[0350] Endurance running performance mice. The exercise regimen on a treadmill commenced at a speed of 15 cm/s. Every 12 minutes, speed was increased by 3 cm/s. To engage hindlimb usage an inclination of 10 degrees was used. Mice were considered exhausted and removed from the treadmill if 5 or more shocks (0.1 mA) per minute were received for two consecutive minutes. The distance travelled was registered as maximal running distance.

[0351] Grip strength. Muscle strength was assessed by grip strength test. The grip strength of each mouse was measured on a pulldown grid assembly connected to a grip strength meter (Columbus Instruments). The mouse was drawn along a straight line parallel to the grip, providing peak force. Hindlimb grip strength was calculated by subtracting forelimb grip strength from four limb grip strength. The experiment was repeated three times, and the highest value was included in the analysis. Experiments were repeated twice.

[0352] BXD mouse population. 34 BXD strains from the mouse genetic reference population were housed in micro-isolator cages in a room illuminated from 7:00 AM to 7:00 PM with ad libitum access to either high fat or chow diet and water. Upon sacrifice gastrocnemius muscles were excised, snap frozen, and pooled (3-5 mice per strain) for subsequent analysis of Cytor expression by RT-qPCR. For the in silico correlation of Cytor expression levels with exercise phenotypes including maximal oxygen uptake in an untrained state (VO2max), oxygen kinetics in trained and untrained state, maximal running distance, and gastrocnemius muscle mass we used publicly available data from the BXD downloaded from GeneNetwork.org. Spearman's r was used to establish correlations between phenotypes and Cytor mRNA levels in gastrocnemius muscle. All BXD experiments were authorized by animal license 2257.1 in Canton of Vaud, Switzerland. The chorogram was obtained using the R/chorogram package.

[0353] Transgenic Caenorhabditis Elegans. C. elegans strains were cultured at 20° C. on nematode growth medium (NGM) agar plates seeded with E. coli strain OP50 unless stated otherwise. Strains used in this study were the wild-type Bristol N2 and COP2054. N2 strain was provided by the Caenorhabditis Genetics Center (University of Minnesota). For RNAi experiments, worms were exposed to egl-44 RNAi or an empty vector control plasmid using maternal treatment to ensure robust knock down of the investigated gene. Verteporfin was dissolved in DMSO, and used at a final concentration of 10 uM. Worms were exposed to verteporfin starting from L4 stage. Verteporfin or DMSO was added to agar before preparing plates. To ensure a permanent exposure to the compound, plates were changed twice a week. The COP2054 worm strain expressing human CYTOR was generated by a custom transgenic service (Knudra Transgenics, Salt Lake City, UT). Briefly, Mosi-mediated Single Copy Insertion (MosSCI) started with the construction of myo3p::CYTOR::tbb2u, where the myo3p promoter and tbb-2 3′-UTR were taken from the N2 genome, and CYTOR was synthesized with codon and intron optimization for C. elegans. This construct was cloned into the pNU936 backbone for delivery to the ttTi5605 locus on chromosome II. The pNU936 backbone containing myo3p::CYTOR::tbb2u including an unc-119 rescue cassette, was injected into the COP93 [unc-119(ed3); ttTi5605] strain. The MosSCI plasmid was injected at 15 ng/mL. Injected animals were screened for unc-119 rescue. Candidates absent of array markers were homozygous. This was confirmed by PCR for amplicons specific to targeted insertion and identified as COP2054:knuSi831 [pnu2144(myo3p::CYTOR::tbb-2u,unc-119(+))]II;unc-119(ed3)III.

[0354] C. Elegans motility. C. elegans movement analysis was performed at day 15 of adulthood, using the Movement Tracker software as done previously. The experiments were repeated at least twice.

[0355] C. Elegans paralysis and death score. 45 to 60 worms per condition were manually scored for paralysis after poking. Worms that were unable to respond to any repeated stimulation were scored as dead. Results are representative of data obtained from at least two independent experiments.

[0356] C. Elegans morphology. A population of ˜100 worms was washed in M9 and frozen in liquid nitrogen. Immediately after, worms were lyophilized using a centrifugal evaporator and permeabilized using ice cold acetone. 2 U phalloidin (Thermo Scientific) was resuspended in 20 μl of a buffer containing: Na-phosphate pH 7.5 (final concentration 0.2 mM), MgCl₂ (final concentration 1 mM), SDS (final concentration 0.004%) and dH₂O to volume. The worms were incubated for 1 h in the dark and then washed twice in PBS, prior to mounting on 2% agar pad. Confocal images were acquired with Zeiss LSM 700 Upright confocal microscope (Carl Zeiss AG) under non-saturating exposure conditions. Image processing was performed with the Fiji software.

[0357] Skeletal muscle gene expression in Genotype-Tissue Expression (GTEx) project. For RNA gene expression analyses, we employed post-mortem skeletal muscle biopsies from the GTEx gene expression (dbGAP, approved request #10143-AgingX). As measures of gene expression, we used residual expression levels of transcripts adjusting for the published GTEx covariates. For enrichment analysis or correlation analyses of CYTOR in human skeletal muscle in GTEx genes were ranked based on their Pearson correlation coefficients with expression CYTOR, and GSEA was performed to find the enriched gene sets co-expressed with CYTOR by using R/fgsea package.

[0358] Expression quantitative trait loci (cis-eQTL) analyses. For eQTL analyses, we used the GTEx v8 genotypes obtained from the GTEx web portal (https://gtexportal.org/). For identification of CYTOR cis-eQTLs in skeletal muscle, SNPs±50 kb from the CYTOR start and stop side were included from the 1000 Genomes Project and HBCS and tested for their effect on CYTOR expression in skeletal muscle (GTEx). SNPs with minor allele frequency >10% were included, and SNPs with r2>0.2 were incorporated in the same haploblock based on linkage disequilibrium information from the version 5 of the 1000 Genomes Project. As there were 9 haploblocks within CYTOR we used Bonferroni correction of P<0.0055 for identification of significant cis-eQTLs.

[0359] Helsinki Birth Cohort Study (HBCS). The HBCS includes 13,345 individuals born in Helsinki between 1934 and 1944. The clinical study protocol was approved by the Ethics Committee of Epidemiology and Public Health of the Hospital District of Helsinki and Uusimaa. Written informed consent was obtained from each participant before any study procedure was initiated. The result of the 6-min walk test was expressed as age (for each 5-year group) and sex-standardized percentile scores. DNA was extracted from blood samples and genotyping was performed with the modified Illumina 610k chip by the Wellcome Trust Sanger Institute, Cambridge, UK, according to standard protocols. Genomic coverage was extended by imputation using the 1000 Genomes Phase I integrated variant set (v3/April 2012; NCBI build 37/hg19) as the reference sample and IMPUTE2 software. Before imputation the following QC filters were applied: SNP clustering probability for each genotype >95%, Call rate >95% individuals and markers (99% for markers with MAF <5%), MAF >1%, HWE P>1×10⁻⁶. Moreover, heterozygosity, gender check and relatedness checks were performed, and any discrepancies removed. We performed linear regressions with SNPtest assuming an additive genetic model. We adjusted for age, sex, highest education achieved (basic or less/upper secondary/lower tertiary/upper tertiary) and smoking (yes/no).

[0360] Genotyping human myoblasts. 21 human myoblasts were cultured in 6 well plates in triplicates. DNA was isolated using the kit NucleoSpin Tissue (Macherey Nagel) according to the manufacturer's protocol. PCR for rs74360724 was performed using the KAPA2G mix (Km5104, Kapa Bioscience) according to the manufacturer's protocol. DNA was cleaned up using the PCR cleanup gel extraction kit (Macherey Nagel) according to the manufacturer's protocol prior to sequencing (Microsynth) with the reverse primer.

[0361] Adeno associated virus (AAV) production. Recombinant serotype 9 adeno-associated viral (AAV) vectors were produced according to standard procedures. In brief, HEK AAV-293 cells (Agilent) were co-transfected with the pAAV (AAV-CMVsadCas9-VP64-U6-gRNA or AAV-CMV-sadCas9-VP64-U6-gRNA3) and pDP9 plasmids. The AAV9 particles contained in the cell lysates were isolated on an iodixanol gradient followed by ion exchange FPLC using a HiTrap Q-FF column (5 ml, GE Healthcare) connected to an AKTA start chromatography system (GE Healthcare). After buffer exchange (resuspension in DPBS) and concentration on a centrifugal filter (cut-off 100 kDa, Amicon Ultra, Millipore), the vector suspensions were titered by real-time PCR for the presence of genome-containing particles (VG). AAV9 intramuscular injections in mice were done in both gastrocnemius muscles with 1 E11 VG for each muscle, at three different injections sites.

[0362] Immunohistochemistry. Right Gastrocnemius muscles were embedded in Thermo Scientific™ Shandon™ Cryomatrix™ and frozen in isopentane, cooled in liquid nitrogen, for 1 min before being transferred to dry ice and stored at −80° C. 8 μm cryosections were cut from fresh frozen samples, dried for 10 min, and placed in Harris Hematoxyline (Gill II Pap 1; Biosystems 3873.2500) for 5 min nuclear staining. Sections were then washed with H₂O, differentiated in 1% acid-alcohol (700 mL 100% EtOH (VWR 20820.362), 10 mL Hydrochloric acid 37% (Sigma 30721) and 290 mL H₂O) for a few seconds, washed again with continuous flow of H2O for 10 min, and incubated in Eosine-Phloxine working solution consisting of 1% Eosine Y (Sigma E4382; diluted in H₂O), 1% Phloxine B (Sigma P2759), 95% EtOH and Glacial acetic acid for 10 min to stain the cytoplasm. After dehydration and clearing the section were mounted (Eukitt, Merck 03989). Detection of inflammation was performed manually using a rat anti CD45 (clone 30F-11, Thermo fisher, #14-0451-82, diluted 1:200) 8 um fresh frozen sections. Tissues were fixed with methanol at −20° C. for 10 minutes and completely dried before peroxidase quenching and blocking. Primary antibody was incubated overnight at 4° C. After incubation of a rabbit Immpress HRP (Ready to use, Vector Laboratories), revelation was performed with DAB (3,3′-Diaminobenzidine, Sigma-Aldrich). Selected slides were stained with Sirius red F3B (C135782, Direct red 80) to assess collagen content (or fibrosis). Microscopy images of muscle fibers were imaged using VS120-SL slides scanner (Olympus). Six biological samples per group were analyzed. The fraction of centralized nuclei and measurement of the minimal Feret diameter in gastrocnemius muscles were determined using the ImageJ software quantification of laminin. The minimal Feret diameter is defined as the minimum distance between two parallel tangents at opposing borders of the muscle fiber. This measure has been found to be resistant to deviations away from the optimal cross sectioning profile during the sectioning process. Inflammation representing the regenerative stage of muscle was quantified by ImageJ software as proportion of inflammatory area over total area of the Gastrocnemius muscle cross section.

[0363] Immunofluorescence. Tissue immunostaining was performed on fresh frozen section of mice right gastrocnemius muscles. 8 μm sections were cut from OCT-embedded samples. Sections were dried for 10 min and rehydrated with PBS 3×5 min and blocked with 1% BSA (in PBS) for 30 min. Primary antibody incubation was performed under gentle agitation overnight at 4° C. and subsequently incubated with secondary antibody 1 h at RT after washing 2×5 min with PBS. Then sections were mounted (Fluoromount G, SouthernBiotech) and imaged VS120-SL slides scanner (Olympus). Antibodies to stain for different muscle isoforms were: Myh7 (BA-F8, DHSB), Myh2 (Sc-71, DHSB), Myh4 (BF-F3, DHSB) and laminin (L9393, Sigma). Secondary antibodies used were: Goat anti mouse IgG2b Alexa 350 (#A-21140, Thermo Fisher), Goat anti mouse IgG1 Alexa 594 (#A-21125, Thermo Fisher), Goat anti mouse IgM Alexa 647 (#A-21238, Thermo Fisher) and donkey anti rabbit Alexa 488 (#21206, Thermo Fisher). Six biological samples were analyzed per group. Image processing was done using Fiji. For every image, the proportion of isoforms was calculated as the number of stained fibers for the same isoform divided by total fibers including non-stained fibers.

[0364] Cell culture. The C2C12 mouse myoblast cell line was obtained from the American Type Culture Collection (CRL-1772TM). C2C12 and HEK293T cells (CRL-3216™, ATCCR) were cultured in growth medium consisting of Dulbecco's modified Eagle's medium (Gibco, 41966-029), 20% Fetal Bovine Serum (Gibco, 10270-106) and 100 U/mL penicillin and 100 mg/mL streptomycin (Gibco, 15140-122). Differentiation of Cytor/CYTOR overexpressing cells or Tead1 silenced cells were assessed in culture medium. Human skeletal muscle myoblasts (Lonza, Switzerland) were cultured in DMEM/F12 Glutamax (31331093, Gibco) supplemented with 20% FBS (Gibco, 10270-106) and 1% penicillin/streptomycin (15140-122, Gibco). Human skeletal muscle myoblasts from young, old and DMD donors were obtained from the Groupement Hospitalier Est (CBC BioTec, Centre de Ressources Biologique) and cultured in Ham F10 medium (11550043, Thermo Fisher) with 12% FBS (10270-106, Gibco) and 1% penicillin/streptomycin (Gibco, 15140-122). Muscle cell differentiation was achieved by substituting FBS with 2% horse serum (Gibco, 16050-122). For detachment Trypsin-EDTA 0.05% (25300-062, Gibco) was used for all cell lines. All cells were maintained at 37° C. and 5% CO₂. Cell lines were continuously tested for mycoplasma contamination.

[0365] Cell transfection and transduction. Cell transfections were done using TransiT (Mirus) according to the manufacturer's protocol with a 3:1 ratio of transfection agent to DNA. 24 well plates were transfected with 150 ng DNA, 12 well plates with 300 ng DNA, and 6 well plates with 1 ug DNA. To transfect 25 nM GapmeR or siRNA in C2C12, LipofectamineR RNAiMAX (Thermo Scientific, 13778100) was used following manufacturer's instructions. Lentiviruses were produced by cotransfecting HEK293T cells with lenti plasmid (lentiSAMv2 or lentiSAMv2-gRNA4 mouse or lentiSAMv2-gRNA3 human or lentiSAMv2-gRNA4), the packaging plasmid psPAX2 (addgene #12260) and the envelope plasmid pMD2G (addgene #12259), in a ratio of 4:3:1, respectively. Transfection medium was removed 24 h after transfection and fresh medium was added to the plate. Cell supernatants were collected at 48 h and filtered through a 0.45-μm filter. Cells to be transduced were seeded 24 h prior to infection and then transduced with virus-containing supernatant supplemented with 8 μg/mL polybrene (Millipore). Cells were left to recover for 24 h in growth media before blasticidin (2.5 μg/mL) selection for 7d.

[0366] C2C12 subcellular fractions. To separate nuclear and cytosolic fractions of C2C12 mouse myoblasts, the phenol-free Protein and RNA Isolation System (PARIS) kit was used (AM1921, Invitrogen) according to the manufacturer's protocol. In brief, cells were washed with PBS and lysed on ice with the Cell Fractionation Buffer supplemented with beta mercapethanol. Cell were then centrifuged for 5 min, 500 g at 4° C. to separate nuclear and cytosolic fractions by collecting the supernatant and pellet, respectively. Ice-cold Cell Disruption Buffer was added to the nuclear pellet followed by vortexing for lysis. Lysis/Binding solution was added to the nuclear and cytosolic fraction and an equal amount of 100% EtOH prior to transferring the mixtures to a Filter Cartridge and centrifugation. The Filter Cartridges were then washed with the supplied wash buffers and RNA was eluted with preheated Elution Solution followed by DNase digestion.

[0367] Immunocytochemistry. C2C12 cells or human skeletal muscle myoblasts cultured on a sterilized cover slip in 6-well plates (Greiner bio-one, CELLSTAR, 657160) were fixed in Fixx solution (Thermo Scientific, 9990244) for 15 min and permeabilized in 0.1% Triton X-100 (Amresco, 0694) solution for 15 min at 20° C. Cells were blocked in 3% BSA for 1 h at 20° C. to avoid unspecific antibody binding and then incubated with primary antibody over night at 4° C. with gentle shaking. MyHC was stained using the MF20 primary antibody (1:200, Invitrogen, 14-6503-82) for C2C12 cells and in human muscle cells with a MYL2 antibody (1:140, Abcam, ab79935). The next day cells were incubated with secondary antibody (Thermo Fisher #A10037 for MF20 and #A-21206 for MYL2) for 1 h at 20° C. and nuclei were labelled with DAPI. Immunofluorescence images were acquired using bright field and confocal microscopy. Images were obtained analyzing z-stacks (max intensity) at multiple positions under non-saturating exposure conditions. Image processing was performed using the Fiji software. 10 images were processed for every biological sample and averaged. The myofusion index was calculated as the ratio of nuclei within myotubes to total nuclei. Myotube diameter was measured for 10 randomly chosen myotubes per image. Myotube area was calculated as the total area covered by myotubes.

[0368] RNA isolation and real time qPCR. RNA was isolated using the RNeasy Mini kit (Qiagen, 74106) with the DNase I digestion step and reverse transcribed with the High-Capacity-RNA-to-cDNA kit (Thermo Fisher, 4387406). Gene expression was measured by qPCR using the Power SybrGreen Master mix (Thermo Fisher, 4367659). All quantitative polymerase chain reaction (qPCR) results were calculated relative to the mean of the housekeeping gene Gapdh/GAPDH. The average of two technical replicates was used for each biological data point.

[0369] Electrical pulse stimulation. Human muscle cells (Lonza, Switzerland) or C2C12 mouse myoblasts were differentiated in a 6 well plate with 2% horse serum and connected to a C-dish electrode (IonOptix) to apply electrical current through a carbon electrode immersed in differentiation medium. EPS-mediated contraction of myotubes was verified using light microscopy. As previously optimized, 30V were used with a pulse duration of 2 ms at 1 Hz frequency for 30 min. Cells were harvested at 0, 30, 60, 120, 180 and 240 min after EPS.

[0370] CRISPR/Cas9 mediated genomic deletion. First, gRNA sequences flankingrs74360724 were cloned into lenti-CRISPRv2-puromycin (addgene #52961) and lenti-CRISPRv2-blasticidin (addgene #83480). Next, human primary myoblasts were double transfected (TransIT, Mirus) with lenti-CRISPRv2-puromycin (addgene #52961) and lenti-CRISPRv2-blasticidin (addgene #83480), containing a guide RNA targeting the genomic region 25 bp upstream and downstream, respectively of rs74360724. Next, cells were double selected with puromycin and blasticidin for 5 days and RNA was extracted (RNeasy Mini kit, 74106, Qiagen), cDNA was generated (Prime Script™ RT reagent kit with gDNA Eraser, RR047A, Takara Bio) and gene expression measured with real-time quantitative PCR (TB GreenR Premix Ex Taq™, RR420L, Takara Bio).

[0371] CRISPR dCas9 overexpression experiments. Five gRNAs for Cytor/CYTOR were designed with the help of the online GPP web portal tool (https://portals.broadinstitute.org/gpp/public/analysis-tools/sgrna-designcrisprai?mechanism=CRISPRa) using Streptococcus pyogenes PAM sequence (NGG) for sp-CRISPRa in vitro application or Streptococcus aureus PAM sequence (NNGRR) for sa-CRISPRa in vivo. The gRNAs with best predicted on- and off-target scores were selected for mouse and human. The oligonucleotides were synthesized and cloned into the gRNA-MS2 (#61424, Addgene) using Bbsl restriction enzyme, AAV-CMV-sadCas9-VP64-U6-gRNA using Bsal restriction enzyme and lentiSAMv2 (#75112, Addgene) using the BsmBI restriction enzyme (Genewiz, New Jersey). Insertion by cloning was verified by Sanger sequencing (Microsynth, Switzerland). To test the efficiency of the gRNAs for sp-CRISPRa in mouse cells, the cloned vectors with inserted gRNA sequences or the empty vector plasmid (gRNA-MS2) were transiently transfected (TransIT, Mirus) in C2C12 cells stably expressing spdCas9-VP64-MS2-P65-HSF1, and 48 h after transfection RNA was isolated, reverse transcribed and Cytor expression was measured by RT-qPCR. Cytor overexpression in mice was performed as shown previously for Lama1. To test the efficiency of the gRNAs for sa-CRISPRa, the cloned vectors with inserted gRNA sequences or the empty vector plasmid (AAV-CMV-sadCas9-VP64-U6-gRNA) were transiently transfected (TransIT, Mirus) in C2C12 cells, and 48 h after transfection RNA was isolated, reverse transcribed and Cytor expression was measured by RT-qPCR. To test the efficiency of the gRNAs for sp-CRISPRa in human cells, the cloned vectors with inserted gRNA sequences or the empty vector plasmid (lentiSAMv2) were transiently transfected (TransIT, Mirus) in human muscle cells (Lonza, Switzerland), and 48 h after transfection RNA was isolated, reverse transcribed and CYTOR expression was measured by RT-qPCR. Lentivirus was produced from lentiSAMv2, lentiSAMv2-gRNA3 and lentiSAMv2-gRNA4 to transduce aged human myoblast cell line 171. Lentivirus was also produced from lentiSAMv2 and lentiSAMv2-gRNA4 to transduce C2C12 mouse myoblasts and establish a cell line stably overexpressing Cytor.

[0372] Epigenetic silencing of cis-regulatory elements. First, gRNAs targeting rs74924495, rs72624662 or rs74360724 were designed using the UCSC CRISPR/Cas9 track. The oligonucleotides were synthesized and cloned into the phU6-gRNA (#53188, Addgene) using Bbsl restriction enzyme (Genewiz, New Jersey). Insertion by cloning was verified by Sanger sequencing (Microsynth, Switzerland). Next, human skeletal muscle myoblasts (Lonza, Switzerland) were cultured in 24 well plates and reverse co-transfected with a plasmid expressing dCas9-KRABMeCP2 (#110821, Addgene) together with either the empty phU6 plasmid or the subclones expressing the gRNAs using TransiT (Mirus). To achieve equimolarity these two plasmids were transfected at the ratio 2.4:1. Experiments were repeated at least twice.

[0373] Cell proliferation assay. Mouse C2C12 myoblasts or human primary myoblasts overexpressing Cytor/CYTOR were cultured in 96 well plates. The Brdu assay was performed as indicated in the manufacturer's protocol (Cell Proliferation ELISA, BrdU (colorimetric), 11 647 229 001, Roche). In brief, after incubation, MTT was added (0.5 mg/mL final concentration) and cells were incubated again for 4 h. Then Solubilization solution was added to the wells and after overnight incubation spectrophotometrical absorbance was measured with a 550 nm filter.

[0374] Phosphofructokinase activity. Phosphofructokinase activity in mouse gastrocnemius tissue and C2C12 myoblasts where Cytor was knocked down or overexpressed was measured according to the manufacturer's protocol (6-Phosphofructokinase Activity Assay Kit (Colorimetric), ab155898, Abcam). In brief, samples were homogenized with the supplied Assay Buffer and protein concentration was measured (Protein Assay Kit II, 5000002, Bio-Rad) to use 10 ug and 20 ug protein from tissue and cell samples, respectively for the assay. The reaction mix was incubated at 37° C. and absorbance at 450 nm was measured every 5 min.

[0375] CYTOR promoter tagging with dCas9-HA. The same gRNA sequence that upregulated CYTOR expression in human myoblasts was used (GTATGAAGAGAATGTCGGGAG, SEQ ID NO:38) as it was designed to target the promoter of CYTOR and cloned into the phU6-gRNA plasmid using Bbsl restriction enzyme (Genewiz, New Jersey). Insertion by cloning was verified by Sanger sequencing (Microsynth, Switzerland). HEK293 cells cultured in 15 cm dishes were co-transfected with dCas9-HA (#61355, Addgene) and the empty phU6 plasmid (EV) or its subclone expressing the gRNA sequence.

[0376] Chromatin immunoprecipitation followed by qPCR (ChIP-qPCR). After washing cells with PBS cells were crosslinked with 1% formaldehyde for 10 min at room temperature followed by quenching with glycine (final concentration of 0.125M) to stop the crosslinking reaction before harvesting cells with SDS Buffer (50 mM Tris-HCl (pH 8), 100 mM NaCl, 5 mM EDTA (pH 8.0), 0.2% NaN3, 0.5% SDS, 0.5 mM phenylmethylsulfonyl fluoride) complemented with protease inhibitor cocktail. Nuclei were pelleted by centrifugation for 6 min at 250 g and resuspended in ice-cold IP Buffer (IP buffer=1 volume SDS Buffer: 0.5 volume Triton Dilution Buffer (100 mM Tris-HCl, 100 mM NaCl, 5 mM EDTA, 0.2% NaN₃, 5% Triton X-100)) for sonication (Diagenode, Biorupter) to fragment lengths of 200-500 bp. Samples were divided for precipitation of IgG or specific antibody (HA, H3K27ac, H3K27me3, H3K9me3, Tead1) while 2.5% was used as input. Samples were incubated with 2.5 ug primary antibody overnight at 4° C. rotating and then incubated for 4 h at 4° C. with 50 uL washed beads (Magnetic Dynabeads A, Thermofisher #88836). After washing the beads with a wash buffer consisting of 1% Triton X-100, 0.1% SDS, 150 mM NaCl, 2 mM EDTA, 20 mM Tris-HCl cells were de-crosslinked using 120 ul of 1% SDS, 0.1M NaHCO₃ for 6 h at 65 C. Next, PB buffer was added and purification of DNA was done according to the manufacturer's protocol (MinElute PCR purification kit, Qiagen). 50 uL eluted DNA was used to perform RT-qPCR.

[0377] RNA sequencing library preparation and analyses. Total RNA from C2C12 cells was extracted by column using RNeasy Mini kit (QIAGEN, 74104) following manufacturers protocol. Amount and purity (A260/A230 and A260/280 >2.0) of isolated RNA were measured by spectrophotometry (Nanodrop, Thermo Fisher Scientific, Norway), while RNA integrity (RNA integrity number >8) was assessed using Agilent RNA 6000 Nano Kit on a 2100 Bioanalyzer instrument (Agilent Technologies, USA). All 24 samples passed RNA quality control. cDNA libraries were prepared with the TruSeq Stranded mRNA kit (Illumina, USA) following Illumina's protocol. Libraries were quantitated by qPCR and validated using Agilent High Sensitivity DNA Kit on a Bioanalyzer. Libraries were normalized to 22 pM and subjected to cluster and paired-end sequencing was performed on a HiSeq2500 instrument (Illumina, USA), according to the manufacturer's instructions. RNA-seq alignment was performed with the STAR software. Differences in gene expression were determined by a Benjamini and Hochberg's False Discovery Rate (FDR) of 5% or less. RNA-seq was performed at the Genomics Core Facility (GCF), Norwegian University of Science and Technology (NTNU). GCF is funded by the Faculty of Medicine and Health Sciences at NTNU and Central Norway Regional Health Authority.

[0378] ATAC sequencing library preparation and analyses. We adapted the previously published Omni-ATACseq protocol to C2C12 cells. In brief, C2C12 cells were cultured until reaching confluency and after several washes with PBS 50,000 cells were pelleted at 4° C. for 5 min and resuspended in a buffer consisting of 0.1% NP40 (Sigma/Roche cat #11332473001), 0.1% Tween-20 (Sigma/Roche cat #11332465001), and 0.01% Digitonin (Promega cat #G9441). Cells were pelleted again at 4° C. for 10 min and resuspended in a transposition mixture containing TD buffer (15027866, Nextera DNA Flex Library Prep), 100 nM transposase (15027865 Nextera DNA Flex Library Prep), PBS, 1% digitonin (Promega cat #G9441), 10% Tween-20 (Sigma/Roche cat #11332465001), and H2O. After incubation for 30 min at 37° C. at 1000 RPM mixing, samples were cleaned up using Zymo DNA Clean and Concentrator-5 Kit (cat #D4014) prior to 5 rounds of PCR amplification using the NEBNext 2× MasterMix (NEB #M0541 L) together with i5 and i7 primers. Our library was quantified with the KAPA Library Quantification kit (cat #KK4854) according to the manufacturer's protocol. Sequencing was performed on a HiSeq2000 system (Illumina) with >63 million pair-end reads with 75 bp read length per sample. Quality and adaptor trimming were performed using TrimGalore and Cutadapt. Phred score cut off of 20 was used and all reads over 20 bp long containing less than 10.0 percent errors were retained. If one read of a pair failed to meet the requirements both were removed, retaining only matching pairs. Filtered reads were aligned to the mouse mm10 genome using bowtie2. Duplicates were marked and removed using Picard Tools Mark Duplicates. Mitochondrial regions, non-unique alignments, non-primary alignments were removed all while retaining properly paired reads (Samtools). Peak calling was carried out using MAC2 in BAMPE mode for all samples. Blacklisted regions were removed using BEDTools intersect. Using the TxDb.Mmusculus.UCSC.mm10.known Gene library transcription start site (TSS) regions were determined. ATAC-seq signal of TSSs for open-, mono- and di-nucleosome signal profiles were produced using the soGGi library and only nucleosome free reads (<100 bp) were used. Peaks were then annotated using the annotatePeak tool of ChIPseeker R library. Annotation was carried out on all regions and also on TSS regions only. The R package Rsubread was used to count paired reads aligning to the regions defined by our consensus peak set. Reads were filtered to retain only those that aligned to peaks present in at least 3 replicates. The DESeq2 R package was used for the identification of differentially accessible genomic regions. Promoter regions (TSS+/−500 bp) were extracted from the TxDb.Mmusculus.UCSC.mm10.knownGene database library. Genes names were annotated using the annotatePeak function from the ChIPseeker package. The function enrichGO from the R package clusterProfiler was used to conduct overrepresentation analysis of GO terms using the whole genome as background. Motif searches were carried out using the findMotifsGenome.pl script from the HOMER suite of tools.

[0379] RNA-Fluorescence in situ hybridization. Human skeletal muscle cells (Lonza, Switzerland) were cultured on a 18 mm round glass coverslip (Marienfeld GmbH) in a 12 well plate and fixated with 4% formaldehyde for 10 min. After permeabilization of cells with 70% ethanol cells were washed with Wash Buffer A from (SMF-WA1-60; StellarisR) incubated in with the probes diluted in Hybridization buffer (SMF-HB1-10; StellarisR) at 37° C. overnight in the dark. GAPDH probes (SMF-2019-1; StellarisR) was used as a positive control for cytosolic RNA, MALAT1 for nuclear RNA (SMF-2046-1; StellarisR). After washing with Wash Buffer A coverslips were incubated with DAPI for 20 min in the dark before washing with Wash Buffer B (SMF-WB1-20; StellarisR) and mounting (Fluoromount G, SouthernBiotech) coverslips and imaging with a fluorescence microscope (DM5500, Leica).

[0380] Luciferase assay. The 25 base pairs surrounding the variants rs74924495, rs72624662 and rs74360724 of the minor (A) or major (G) allele (table S6) were synthesized (Genewiz) and subcloned into the pGL3-promoter vector (Promega) using the Xbal restriction enzyme (NEB, R0145) and sequenced to check the correct directionality of the inserted sequence. For the luciferase assay, human muscle cells (Lonza, Switzerland) were seeded in 96 well plates and 24 h after transfected with 100 μg of either the pGL3-promoter (Promega, E1761) or pGL3-rs74924495-G, pGL3-rs74924495-A, pGL3-rs72624662-G, pGL3-rs72624662-A, pGL3-rs74360724-G, or pGL3-rs74360724-A plasmid. In all conditions, cells were co-transfected with 10 μg of pRL-TK Renilla expressing vector. TransiT (Mirus) was used as transfection reagent, following manufacturer's instructions. Cells were analyzed for both Luciferase and Renilla luminescence using the Dual-GloR Luciferase Assay System Protocol (Promega, E2920), according to the manufacturer's instructions. Experiments were repeated at least twice.

[0381] Human datasets. Gene expression analysis of young vs. old human muscle biopsies was obtained from publicly available microarray dataset GSE25941. Young (n=8) and old (n=11) healthy female participants who have never been involved in any formal exercise were analyzed. Skeletal muscle biopsies were obtained from the vastus lateralis in the basal state and analyzed using the Affymetrix Human Genome U133 Plus 2.0 Array platform. Differential gene expression in this microarray dataset was analyzed with GEO2R, a bioinformatics tool from NCBI (https://www.ncbi.nlm.nih.gov/geo/info/geo2r.html) that allows the comparison of groups of samples from the GEO database. We verified that information provided by the data submitter was sufficient to identify the group allocation, and performed differential gene expression analysis.

[0382] Bioinformatic analyses. The public available RNA sequencing dataset GSE71972 was analyzed by aligning the raw sequencing data to the human genome using STAR and to the human transcriptome using kallisto. Protein-coding genes and pseudogenes were excluded from both analyses. To get robust differentially expressed long noncoding RNAs, results from the two aligning methods were overlapped (Table 1). Cytor expression in the type I muscle soleus (n=10) compared to the type II muscle EDL (n=11) was analyzed in the public available dataset GSE112716. Cytor was identified by the probe ID 47174 which corresponds to Gm14005. Outliers with expression values <10 were removed from the analysis. The chromatin immunoprecipitation tracks of H3K27ac and H3K4me1 collected in human primary myoblasts were extracted from GSE126099 and the inventor's published threshold was used to define enhancer elements where there was an overlap between H3K27ac and H3K4me1.

The application's sequence listing, which the Patent Office published only in electronic form, follows.

SEQUENCE LISTING (46 sequences)

SEQ ID NO: 1 - RNA, 542 nt, Homo sapiens
ucguuccaaugagaaugaaggcugaggugugcgccuuuuuuuuuuuuuccuucuuagucguguguacaucauugggaauggagggaaauaaaugacuggauggucgcugcuuuuuaaguuucaaauugacauuccagacaagcggugccugagcccgugccugucuucagaucuucacagcacaguuccugggaagguggagccaccagccucuccuugaauaacugggagaugaaacaggaagcucuaugacacacuugaucgaauaugacagacaccgaaaaucacgacucagcccccuccagcaccucuaccuguugcccgccgaucacagccggaaugcagcugaaagauucccuggggccugguuccaaccgcccacuguggacucugaggccucugcauuugcggguggucugccugugauauuuuggucaugggcuggucuggucgguuucccauuugucuggccagucucuaugugucuuaaucccuuguccuucauuaaaagcaaaacuaaagaaaacagaaaaaaaaaaaaa

SEQ ID NO: 2 - RNA, 852 nt, Homo sapiens
ucguuccaaugagaaugaaggcugaggugugcgccuuuuuuuuuuuuuccuucuuagucguguguacaucauugggaauggagggaaauaaaugacuggauggucgcugcuuuuuaaguuucaaauugacauuccagacaagcggugccugagcccgugccugucuucagaucuucacagcacaguuccugggaagguggagccaccagccucuccuuguccuggaggcuggaagugcaaaaggaaggugucggcaagaucguuuuuuucugagagcucucuccuuggcuugcagauggcagccugcuccuggcacagucuuuucucuacucaugcccaaaguuacggaggacccagcaaccaucuccugcagccccuggaaaccucuugacucuucugugauguccccagugauccagcagcccuggccuucuuuugauggcuugaacauuuggucuucauugaacaguuuguauauuggaaacuugccagccuccauccacauuccaaccuccgucugcaucccucgaauaacugggagaugaaacaggaagcucuaugacacacuugaucgaauaugacagacaccgaaaaucacgacucagcccccuccagcaccucuaccuguugcccgccgaucacagccggaaugcagcugaaagauucccuggggccugguuccaaccgcccacuguggacucugaggccucugcauuugcggguggucugccugugauauuuuggucaugggcuggucuggucgguuucccauuugucuggccagucucuaugugucuuaaucccuuguccuucauuaaaagcaaaacuaaagaaaacagaaaaaaaaaaaaa

SEQ ID NO: 3 - RNA, 677 nt, Homo sapiens
ucguuccaaugagaaugaaggcugaggugugcgccuuuuuuuuuuuuuccuucuuagucguguguacaucauugggaauggagggaaauaaaugacuggauggucgcugcuuuuuaaguuucaaauugacauuccagacaagcggugccugagcccgugccugucuucagaucuucacagcacaguuccugggaagguggagccaccagccucuccuugggcaaagaggcagaggaauggagcucagagcuuuuagagaauaugggccagaaacaggaaggagucaggaccugauaacgggaaccagcggacagugaacgcaguggagggccacuggggccggagcagccgagagauuucaggagaauaacugggagaugaaacaggaagcucuaugacacacuugaucgaauaugacagacaccgaaaaucacgacucagcccccuccagcaccucuaccuguugcccgccgaucacagccggaaugcagcugaaagauucccuggggccugguuccaaccgcccacuguggacucugaggccucugcauuugcggguggucugccugugauauuuuggucaugggcuggucuggucgguuucccauuugucuggccagucucuaugugucuuaaucccuuguccuucauuaaaagcaaaacuaaagaaaacagaa

SEQ ID NO: 4 - RNA, 571 nt, Homo sapiens
acacucagggaguacaccaugugaagacuggacuuaaacagcuacaccaccagaagccgagagagaggcuggaacauagccuucccuuuggagcccuagcagaugcuaauccagcgugcguccugacagagguugaagggggcuucucaagucccagguccagcuuggugugguucagcuacucaagagacaucugcugcuaauggaugagcagucaaccuggacgcaggaaaucauuuuuuauuuggaauaacugggagaugaaacaggaagcucuaugacacacuugaucgaauaugacagacaccgaaaaucacgacucagcccccuccagcaccucuaccuguugcccgccgaucacagccggaaugcagcugaaagauucccuggggccugguuccaaccgcccacuguggacucugaggccucugcauuugcggguggucugccugugauauuuuggucaugggcuggucuggucgguuucccauuugucuggccagucucuaugugucuuaaucccuuguccuucauuaaaagcaaaacuaaagaaaacagaaaaaaaaaaaaa

SEQ ID NO: 5 - RNA, 732 nt, Homo sapiens
ucguuccaaugagaaugaaggcugaggugugcgccuuuuuuuuuuuuuccuucuuagucguguguacaucauugggaauggagggaaauaaaugacuggauggucgcugcuuuuuaaguuucaaauugacauuccagacaagcggugccugagcccgugccugucuucagaucuucacagcacaguuccugggaagguggagccaccagccucuccuugacucaugcccaaaguuacggaggacccagcaaccaucuccugcagccccuggaaaccucuugacucuucugugauguccccagugauccagcagcccuggccuucuuuugauggcuugaacauuuggucuucauugaacaguuuguauauuggaaacuugccagccuccauccacauuccaaccuccgucugcaucccucgaauaacugggagaugaaacaggaagcucuaugacacacuugaucgaauaugacagacaccgaaaaucacgacucagcccccuccagcaccucuaccuguugcccgccgaucacagccggaaugcagcugaaagauucccuggggccugguuccaaccgcccacuguggacucugaggccucugcauuugcggguggucugccugugauauuuuggucaugggcuggucuggucgguuucccauuugucuggccagucucuaugugucuuaaucccuuguccuucauuaaaagcaaaacuaaagaaaacagaa

SEQ ID NO: 6 - RNA, 529 nt, Homo sapiens
guuccaaugagaaugaaggcugaggugugcgccuuuuuuuuuuuuuccuucuuagucguguguacaucauugggaauggagggaaauaaaugacuggauggucgcugcuuuuuaaguuucaaauugacauuccagacaagcggugccugagcccgugccugucuucagaucuucacagcacaguuccugggaagguggagccaccagccucuccuugaauaacugggagaugaaacaggaagcucuaugacacacuugaucgaauaugacagacaccgaaaaucacgacucagcccccuccagcaccucuaccuguugcccgccgaucacagccggaaugcagcugaaagauucccuggggccugguuccaaccgcccacuguggacucugaggccucugcauuugcggguggucugccugugauauuuuggucaugggcuggucuggucgguuucccauuugucuggccagucucuaugugucuuaaucccuuguccuucauuaaaagcaaaacuaaagaaaacagaa

SEQ ID NO: 7 - RNA, 2797 nt, Mus musculus
gagucagcacgagucaucugguuccagugacaaugaagacugaggugucugcuuugcaguuuuuuuuuuucuuuucuugucuuuuuuuuuuuuuuuccuaaucauguggacaucucugagaaugaggggacugggugacuuugcagugucugcuuucuaaguuucaaagugacuuuccaggcaagcugcgcauaucuugggaucuucacagcacaguggcugggaaggcaggcggacccgucuaucagcuucucccuggugggauucuugcgggggcagggaucgagucaaaccuuggaaaugacgucauucugaacucaucugccuuuauccagaagacuaccaaagcaaaccagaggaccagagaacagcagcugcucuggacaaagaggggaggacacccacacccacauaccaaguucugguugacuucuacagcagaagaagcaggagacacaagaagacucagagggacugaaauauaagaagaucgaugccagauguuguugugaugacaaccuguuggguugaaggaccccaggaagacacaguccagauucacagggacagagccacucaccuauugucacaugcagcacagaauaaugcagaggcauggcaucauaacaauuccugaauggugcuucucagaagaugguacuucuuggggucugguaccuggacuagugaggcuucucaggggaugggaccccaacccagaaugacaacaucaccugauaacuucaucuucaucauuaucaucaucaucaucauuguuguuauuccuuuuguuuuguuuugagauuguaauaaaauuauaucauuucuccauugcccucccucccuccaaacccugugauuuaccucuccuugcucucucaaauucauagccccuuuccccccacaaauugcuguuauacauauauacguacauacacauauuucuaaacacacaaaaacaaccugcucagccuggauaauguuacuuguauguauguuuucagaccuguccauuuggcaucggcugaccagucggugugccucucccuggggaaggguuguucuuccugcucuuugcuuucuguaguugccuguaguucuuuguguaggguugaggucuugugggccaagauccaaaacuucacuagcccugaguaguuagccagguuucgaguacuggacaaaguuuuucucuuguuggggaaauucuuugaaacacacuuucucugggaccuucccagaaucgccaaaucacgcagucagagagcagggcccauggcucuauuuuaacaagaucugcaugcuuguguugcgugugcaaacauuuauccucagugucuagugcuuagacacuguuuacugugguuaaguggcauggacugauagcaugaggauggccugagaauaggugaauaauuggucacaccagagagggaggggggagggggagagagggggaaggggaaggggagggggagagggaaagggagguggggggaggaagaggaggaggagaaaagggauccaauccggaccccucaccucuuaaggccccacuuggguuaaacaguagccaggcacacaggacacagaagacagaggggacagagaaauagaaaagugccaacacuuuaccaacugaguugccuucuccuuagccuaagaaaauauuuuaaaacaaaacaaaacaacccagccacuuucuaaguauacaaaaaacucaaugaguaacaguaaacauagguuaauaaguaguauuaauauuuucuauggagauaucaggucuuugagagguagcucagcuuccggguucacccauucacucauucaguccagcaugaagcuggcaugggacguccagccuggaaauaaguaagucuuggaugagccaaaggcuggagcaagagaggacucgcucccaucccaacaaugaagggaugcagggcagagugguggaagggcagagaugcucccaaagacaggguaaagggagccucaccccacauucugcccuuaguuugggcuggaaaugucccuagaagaacagagaaaccgaggagggaucaugagcuaguccucagcccaucgcccgugcuuugagcucucucuugacacagcaagcaagacugauuauagacaaauguccguucuugcuuucugcauccagggccugagagaucucagacgcccaugcuugcucaggaagcuguuucugacauuggccuguuuggugaccagaaacugaugcuguuucuccacguggccuacagcuggccaguuggcagugguacggcugagccucagaauacugacaauggcuguuuucaucccaugagcagauuggugucaaggcuggaaagaaagaaagauuuuucacucaacucccacucuucccaaacaagccaacaagaaggcgagguguuuggaggccucccacacccuauacgugacccuuuuuguauuugcucaaggugguaguaccacaguuagaaccuuuggaguuuuuuugguauccuuuuagucuguguuaaugugucucugcuguacuuaaauucucuucaaaaugaccuccacaucgauacauuucuuggaauucacaugugaguaagaaaagauaagauaggcuggcaagaugguucagugguuaagagcgcggacugcucuuccgaagguccugaguucaaaucccagcaaccacaugguggcucacaacuaucuguaaugagaucugaugcccucuucuggagugucugaagacagcuacaguguacuuacauuaaauaaauaaauaaaucuu

SEQ ID NO: 8 - RNA, 1836 nt, Mus musculus
gagucagcacgagucaucugguuccagugacaaugaagacugaggugucugcuuugcaguuuuuuuuuuucuuuucuugucuuuuuuuuuuuuuuuccuaaucauguggacaucucugagaaugaggggacugggugacuuugcagugucugcuuucuaaguuucaaagugacuuuccaggcaagcugcgcauaucuugggaucuucacagcacaguggcugggaaggcaggcggacccgucuaucagcuucucccuggugggauucuugcgggggcagggaucgagucaaaccuuggaaaugacgucauucugaacucaucugccuuuauccagaagacuaccaaagcaaaccagaggaccagagaacagcagcugcucuggacaaagaggggaggacacccacacccacauaccaaguucugguugacuucuacagcagaagaagcaggagacacaagaagucuccucagaagaacauugaccagcacgccugcauccuuucuguucugacacacuuguuaccuggaugacuucuuucucaucacccacgugccaagagugccaugucucaucuggaccagagacucugaggaucacaccaacagagacacaaaugacacuuaaagaaagccacaucagcuuuuacaacuuaccccccaauaccgaaugucaucaacucaauuuaaaucauuggaugguucuguucucagggccagagaguuucacuaaacuucgucgaacccuucgguauaacugucaacugugcagagugugcuuggugucuggauucucagccuucaguguaaucauguuuacauccccaggugucagaaaauucccccugacccuuaacccccaacccuuagcauguuggugucuuagcuuuuacaaugucauugcuggacuugacugcuuuucacaaagguagcugcccaacuagccaugccccaaccaguacauucuucuugguugcauucuuaaauucucagacuuuuucuuaacaaaugugacaacugaauguuuauugguguugguuuggacuucauuuaauccuguuaaaaccaguuugugucagucacaaucuggugguucauugauuguccuucucugaauccgcucaccaucacauuugacaccuaggcuuucauuuuuucccccugagucaggguuuuucuguguagcccugggugucccagaaccugcucuguagaccaggugaacucagagauucaccugccucugccuuccaagugcuagaauucaaggugugcaccacuacccugagcuuucuacauuuuuaugucuuugaauaucaaguuugcagugagaaaacugaggcucagggugguggagucacgugaccaaagucucaagacuccagaggggagcugagcugaguggugauaagggccugugcuucugaaaccagggcacauggccagagcagaguagcagucgacagugacaaggacacuagugucacacccaacaguccacuaugaagucacauaccugacucaugacacccuagcaauaccaccagccaauccacuuccuaacaucuaaggaucuccaaggacuccagcaaauggugguuuggggagaccaaggucccuagcacagaucuaagagucuccauuguggaacuucaaaguguucaggguucuauccgggcauccguuugacugggaauccuuuuuuacacugcuccauauuuguccauuucaaaaaugagaauauacuuuguucacugccuugaugaaauugauuucaguuuaaucaguugcacccuguuuaauagaccuguuauaaaagaugugcauuugugucuauc

SEQ ID NO: 9 - RNA, 580 nt, Mus musculus
gagucagcacgagucaucugguuccagugacaaugaagacugaggugucugcuuugcaguuuuuuuuuuucuuuucuugucuuuuuuuuuuuuuuuccuaaucauguggacaucucugagaaugaggggacugggugacuuugcagugucugcuuucuaaguuucaaagugacuuuccaggcaagcugcgcauaucuugggaucuucacagcacaguggcugggaaggcaggcggacccgucuaucagcuucucccugaauaacugggagcugaaacaggaagccccaugacacaguugaucgaaaaugacacagacacagaaaaaucaggacgugcccccagcagcaccccuaccugcugccugcugaucacggcugggaggcccguccaggguucccacccgggaacggacucuuagcuacucagugcucacgggugcugggccugcagagcuuuucggaugcucucuuacagcugguuuguuaucuuuuaaucaaucaacuaauuaaucuauuacuuuauuuauuggcccuccccaugucuugauccuuucuucauuaaaagcaaaaggaaagaaaa

SEQ ID NO: 10 - RNA, 933 nt, Mus musculus
gugacaaugaagacugaggugucugcuuugcaguuuuuuuuuuucuuuucuugucuuuuuuuuuuuuuuuccuaaucauguggacaucucugagaaugaggggacugggugacuuugcagugucugcuuucuaaguuucaaagugacuuuccaggcaagcugcgcauaucuugggaucuucacagcacaguggcugggaaggcaggcggacccgucuaucagcuucucccuggucacagaauugugggugaugaguucuuuguucuagaacuuccuguguaaugaaacugccauccauaauuguuuuccuguggacugcuuauuaaaagaagugauuuuugaugaacuaaacuaggugggauucuugcgggggcagggaucgagucaaaccuuggaaaugacgucauucugaacucaucugccuuuauccagaagacuaccaaagcaaaccagaggaccagagaacagcagcugcucuggacaaagaggggaggacacccacacccacauaccaaguucugguugacuucuacagcagaagaagcaggagacacaagaagacucagagggacugaaauauaagaagaucgaugccagauguuguugugaugacaaccuguuggguugaaggaccccaggaagacacaguccagauucacagggacagagccacucaccuauugucacaugcagcacagaauaaugcagaggcauggcaucauaacaauuccugaauggugcuucucagaagaugguacuucuuggggucugguaccuggacuagugaggcuucucaggggaugggaccccaacccagaaugacaacaucaccugauaacuucaucuucaucauuaucaucaucaucaucauuguuguuauuccuuuuguuuuguuuugagauuguaauaaaauuauaucauuucuccauugcc

SEQ ID NO: 11 - RNA, 448 nt, Mus musculus
aggcuccuuugcagucagaaagaugaagacuaguagugggcuugccagggaugcuggaaagcucuuuaaaggacucugacaucucugauccuugacuuugcugcucuggacucccaaguguuccagaauaacugggagcugaaacaggaagccccaugacacaguugaucgaaaaugacacagacacagaaaaaucaggacgugcccccagcagcaccccuaccugcugccugcugaucacggcugggaggcccguccaggguucccacccgggaacggacucuuagcuacucagugcucacgggugcugggccugcagagcuuuucggaugcucucuuacagcugguuuguuaucuuuuaaucaaucaacuaauuaaucuauuacuuuauuuauuggcccuccccaugucuugauccuuucuucauuaaaagcaaaaggaaagaaaa

SEQ ID NO: 12 - RNA, 589 nt, Mus musculus
caagcugcgcauaucuugggaucuucacagcacaguggcugggaaggcaggcggacccgucuaucagcuucucccugaagacuaccaaagcaaaccagaggaccagagaacagcagcugcucuggacaaagaggggaggacacccacacccacauaccaaguucugguugacuucuacagcagaagaagcaggagacacaagaagucuccucagaagaacauugaccagcacgccugcauccuuucuguucugacacacuuguuaccuggaugacuucuuucucaucacccacgugccaagagugccaugucucaucuggaccagagacucugaggaucacaccaacagagacacaaaugacacuuaaagaaagccacaucagcuuuuacaacuuaccccccaauaccgaaugucaucaacucaauuuaaaucauuggaugguucuguucucagggccagagaguuucacuaaacuucgucgaacccuucgguauaacugucaacugugcagagugugcuuggugucuggauucucagccuucaguguaaucauguuuacauccccaggugucagaaaauucccccuga

SEQ ID NO: 13 - RNA, 687 nt, Ovis aries
caugucagggcaguggcugagucugcuugccggggggucaggaaggcuguucuuccaggaagggcugcagagacccugggaacaggacuaggcugcucacaaguaugaagagaaugucgggagaggaagugguggcugugagucagcaugagucaucucguuccaaugagaaugaagacugaggugugcgccuuuuuuuucucucucucucacuuuuuaaauuuuuuuuauuuuuuugagucucaaucguguggacaucacugggaaugaagggaaauaacugacugaauggucguugcuuuuuaaguuucaaaccgacauuccaggcggguugugccugagccagccucgggcuuucagaccuucauagccugguccugagaagguagagcucucagcuucucccugaauaacugggagaugaaacaggaaacuuuaugacacacuugcuugaaaaugacacaggacucagccccucugcaacaccucuaccugcugcccacagccgagugcgggggaagggcuggcccugggaccugauuccagccgccguggacucgccguccagugcgaugugucugccauauugcggucacggucuagucuggucgguuuccuauguagcuggccacucuugguguaucuuugccccuuuuccuucauuaaaagcauaacugacgaaaaaug

SEQ ID NO: 14 - RNA, 1469 nt, Sus scrofa
ugggggguggccuuuagcuuugcaguugcagcucuccucacccuggcugugcgcccaggaccuuccccggaggcagaaaaagccucugaguuugcucagaaucuguugcaaggaaaggugggcucugucuugcuguacauuuggugggucucacccuugagguggaucagcuuuaagaagagugacaggucacuagaggauuucuuuacuacuuggggcuuuccgagaagcgucugugcuucgguaguuuuggucuuauaaaaguuucccaccugcaguagaguuuauaauuacuuaagagcuuuuuauaaaugaacucgauuuccuuugcacucaggauaauuuacagagucaucagucacuucacugcagcugggagcuucacacgaacccugcaaacacacuuugaaaaugaaaccgaguguaagugggagcaaggaagcaugccuuugagggaaauagaaaugacuguccagcaaauggugccuccuguguaucugcugauagguagaaacccuugacaguuuuuggaaaaaggaaaaucuuaaaucauucaccaagauuaugugcaucucauaaaugaacugauaaagauuccagcugaaaaggaucauuccggucuaaaccucauuaaaacaccccuagaugauuuauuuaacauaaaagcacuggaaggcaugccuuucugcccucccuucuccccucuuccaccccuuaacauguuaccaacauuauuucugcuugcgaauuuuuuggucggcauggauggcaccucaaaucacauaaguuaaacuaaaucacauacagggcaaacaaaaacgacugcacuucccaauuucaaggacgugacuugaacgugaacuagacauuugucuuccuaaaacccaggaaaccugaagauucuagaaggaauccaaagguacccucccccccccaguggucuccuuccuuugauguaaucccuggcacgugucucugaccuccauuucuguuagaacuuugcuccuuagccucagggcucucuaccugccucugcuccaugacuuuauauccgugauugcccuugggaaggagaaucuucuuucaaaauugcaccugggcauuuuaaaguaaaaaugaugcaaaugcuuaaguuggccgaggaauuaacuucggagugaagaaugacuagaauaacugggagaugaaacaggaagcccuaugacacacuugcucgaaaaugacacaggcacagaaaaaucaggacucagccccuccagcaccuccaccugcugcccacagcuggagugcaggggacaaguugggccugggaccugauuccgacggccagggacuccaagggccuccgaguuugcugaugaugugucugcgacauugugguuggggucuagucugggcaguuuucuacugaucuggccagucucuguguccuaauccccuucucuucauuaaaagcauaacuaaagaaa

SEQ ID NO: 15 - RNA, 485 nt, Equus caballus
uucuucuuuuuuuuuuuuuuuggucucaaucguggggacaucauugggaauggagggaaaucagugacuguauggucguugcuuuuuaaguuuccaacuggcguuccaggcaagccgugccugagccggugucugccgugagaucuucagagcacgguuccugggaagguagaaccauuagcuucucccugaauaacugggagaugaaacaggaagcucuaugacacacuugaucgaaaaugacacagacguagaaaaaucaggacuccagcaccucuaccugcugucggcugcuggaaggcaggugacagcuuugcccugggaccugauucuagcugccguggacuccaagggccuccgcauucgcugaugaugugucugcgauauugaggucguggucuagucuggucgguuuccuauuuaucuggcgagucucuaugugucuuaaucccuuuuccuccauuaaaagcaaaacgaaagaaaaa

SEQ ID NO: 16 - DNA, 66092 bp, Homo sapiens
tcgttccaatgagaatgaaggctgaggtgtgcgcctttttttttttttccttcttagtcgtgtgtacatcattgggaatggagggaaataaatgactggatggtcgctgctttttaagtttcaaattgacattccagacaagcggtgcctgagcccgtgcctgtcttcagatcttcacagcacagttcctgggaaggtggagccaccagcctctccttggtgagtatgtttctgtcatttttagggttgcttctgcagtttgccttggagtctgggctgtgggaaaggctgctgcgtcctggtgaggacactgcgtttctttcagactttgaagatctgtcgttttagaaaagtggctgcctctgtcaccagccccatggttactgtcctttagtgtgactgtcaggaggtgtttctcagtccttcgttgtaagaatgtagatgccggttgcaccttctgttgtcttggaagagactgcagtgcttggctggaaaataagctgctcgggactcctctgagaagccaaagtgaagctcagagatggaagtgggtatacttgtgctaacccagggttgctgaggttgggtgagcttccgcttctccgaggtggaggagaggcagctcctgagccatttctggcctcgtggtcagagctgcccaatttcagtgtgagaaataccagagaggcagaactttggctgccttctctaaaagcatatgaatgattgcaggagcgtattttacgtcctttccttttccttaacgttgaaagtcacaaactgtagtaaaatcaggaagaacgtaaaaatgctgggggccagcgctgggggtgggggactggggaggactgaggagggggccactcagtctttgaggcctgacttgatcttgataggtatttctcaggctgttagtattccgatgaagcttagctttactgtcaagtaaaatacaggaaacatttttttttaatgttgttctagttactgtaaatgaaacggttaaaatgtcataaataccttatgataaacatttttcaaatttgcttaaaaagcaacacatcagtaggcagggtatgacagggagctttttcagtacagtcatttgagtgtgtgggcttcctgagttaataatgagtcagcacccaattctaaaattggagcagctaagagaatgttcaatctgctcctcagcacagcacggtggctggccggccccccgtaggaaggcttggggttaaaatcgacttaggatgccgcccttatgtaagtgaccagctcccagcttgggtcccagctcctctgggctactgctgagagaccccctctgctaagggatctgtctctgaggcaggagctaacacatttggcttccaacctttggctaatgttgacgatttttaggttgtcttgaggcaacaggttgaacatagtttctgaaatgaaaaatctagtgtttattaaggctagggcagctgagggctgagcctgcatctggagccttgagatgttccgcttgcacgtcaccctcgccgagggattgggcgggagagtcggtcaccgagtgaacttcaaagttggcgctctgcatgtgacgtgtagcgtgggaagattaagtcagcttaaaatgagagaacaagattccaaggaagaaaacctccccagaaccttactcgtttatagataaaagaagataaatattgagaaaattaaaaaaataaaacgaaatagttgggctgcaaaccagcagctctgggaccagatgcagccctggtgaaggcatcccccaccaggttctgtttggcctgctcaggattgtttttttgtgttgagataactgtgggtggggtccacactctccggatctcaggccctgccacaccctaatgccacaaagcttggagagtgcgattacagcgaggctcagaagccaggctgagggcctgccagcctcgtggggctgctgtgtggtccccatgggttagcatctgcccggccgccggaacagggcctggatggagaaggaactccatcagcactaactctgctagactctcttattaatctgccctctgaaggcatttgggcttgtggcccttgagttagttccatggctttttcaagaaagatcctgcagttccaatgtgagcagcagttgtttccaaggctaacaatttcacgccaactagaagcctccacaagtcaggtgccaggcatttctaagccagtagagcagctccgcttgtttctctgggtgagtcctctcagggtgagaccctgtctccttgtaagcactcggagacgtgccaccttcatggagacgggagccaatcaaaggcaaactgcgttagacagctcttccatgcggtatggacaccaacattcgatcatccttgtttcagagaaggtgccgggccccagacatgtgcttatcactgggtcccatggccttcaatcctttaaagggttttaaggtggctgatttttatcccagacattgatcatgttttttttcatgcagaatttgggcagttgtctggacattaggagttgagtcacctcctacccatgaggaacaagcctgtggggggactgatattatcacttctgtcatcaagaaataaggccgcaggcatccctgaatatagagcatttattaatcgaactgtgaaaatgaaacacagacagtgatgacagctggaagttggccaatgtcctgttgtcatattgccctcagcctagggactggcctgtggctcactgaccctgtctcccactctccacctctcatcagcaactggacctggtgcacctggtctacctcatgtccagtgttttccgcagtacctgactggtatccccacccttggttgttgtgtggtgagctcgtccctatgttggcaagttacttaattcctaggtgtcccgccttcctcactgtaaaatgagaaaagtcatagcacgaatgtcatgagtccttgtgaagattttatgattagcacacaagttacaaggagacacgataactgttacgtacgtactcattcgttcggaaatataacagacagcttagtatctccacccgggtccctctgccctgtgggaatccataaagaattgattctcatcccccagaagtgagatcccgcttgtgtcatcaattacatggcatgttctgcatttacaggacatttatttattaggtaagtggggaatcctccttggttctctccaggaaaacctggagttctagttatcatcatcatcatcatcatcatcactgtcatcatcattgacatcatcacaataagaactcccattgtattcagccctaaccgtatggtagcaactttatggtattccctttaacctccccccaccccaatatccatcctggaagatgggaaggatgataggtttgttgactcactcaaggcggtgggactctccagcaggtatcaggcacagcatctgcttcaaagaacacatcggcgacaggggagccccttgcactcactcaggacaggagaatcaggaaaagcagcagatctgcagggctttgtgtgtaatccaaccagactgatgccacaggccaggaaaccgaggacggttggcttcagacctaccctggagtggaagcagctggattctgtcctcacgcttcctgtctaaagccagctagagtaaatttctagtcatctagattctggttatttggaaatcatcacagtatctggagatgactcatattgaaaaaaattaaataagatacacttaaaacttaacccagggtgaacataacatggcctttccttgtcaattctgaagaagatcattcaagtttgtgcagtgccttagaagccagatgctctcttccattctgccagggtcctaaagaagtactactgtgtcctttagatcactctgccttgatcactctgtcccgtcactctgctatttcacctgtcagtgaaatacctggtatcgtcctgccaacatgaagcattgaatgctttatacgtctccatcctgattgtttaggctttgaatgctgagaagtatctgcactttgttggtcaattgtagatggtgctaatttgtggggagtttttcctgcaaattccccctgtgccataatccagaggacctccctctgcccccagtgctgtaggctaggcagctatgggcctggctcagggctgtcgggcaaggattggactctctataggttccgtttggttctggttagatcacagagctcaggcaaggaaaagccgacaatagatcagaaggaagttgagcgctcaggaaggaggagtgggcaggatgcttggtggtgtcagaggattccttcggattaaaaaaaatagatgttattgcactttgtgtaatcagaaaagctaaggttgacagcagatcttatccactgtggttttcctgcttatcttttgttttaggagtgataaccctgcgagtgagggcttctgctacagggtcttgtagctcttctcttcatcctgccctttaaaacatttattggactaaaaatcacaggatttttaatgatgacagaaaatgtattattttagctgttctcactggacaaatcacttacggagtgttgattaatacattgataagtttctatcaattcagctagatacaagggaaaatgtataaaatagcaagggctccgaaaagagtcaggcttaatttctcttgcacagaaaaaggattctattgctctttctgttccgtcctcaaacaggaagcaggttttctgggacaagggtcaacaggcagccagttcatccatctgcctactcagccatccttagcactggcttccttcctccaagttatcttatgcttcaagaaggctgctggagctcctgccatcacttctgcattccagacagaagagaggaaggaagtggagggcaaaaggcaaagcctcctagatgtcagactcctctgcaggcctttccttgaattcccagctaaccctttcagcctagtctttcactggccaccctatctgtaaaggagctggaggaggaagatggaggagtgaggcaaggccctgagatgatgcagagcaaggggcacacaagaggggactcaggtccaaggtgaaatagcagcaagcactctccctccaaaacccaccgcctccttatgaatccctttggccttgattatgccagtagataataggtatgtgacagttttagcttctctggcctttgatcaggttgatttatgtgaatagactccatgtccttggagatgaacctgttctaaaaattctaagcaaccagccatttggctctttgctggaaagtagcctggcttttgaagccaagtctggacagtttccttgctgcacctcaggactcaaaggacatggtcctgactcaggaagagctggctttgagggaaggggtgagtcatgaacccaagcacagcagagattcttggtgtgtgctgcagaaggtgagagtagcccccatctccctgtgccagtcttctgggggaaatttatgatggccttacataattgggcttatatgtgtttcactagaaagacaaaaaaaggtgagaccttgtctgccaattcgctaccacctccttggggtctaagagctaggctgtttgttcaaagctaggctcctttgtgtattaacagtgtgaccccgggcatcatccttaacccctctttgtcccaattccacatctgaatgatggggatgataatggtagactctgccacatatggttctgaggactaagtgaggccacatgtgcaaaggatccggaacagtgcctggccccaagtcagccctcaggcaacagaacagtgtttggattgtccttgttgctttattggatacgtgataagtactggtgaaatgcatgaatgaaaagaaatcccacttgattttaatacaagaatcaagcaagtgacttctgtccctttgaataccctcctccaagtggtccaaagtccttgaagctaccatctccttggtacccttcctgatgcttctggtgtgggcaatgtggttacttcatcaagtagaccctggttacagagaagttaaatgatttgtccccaggcccactcacaggagagagtactatacaatatcaagctggttgtcttcagcactctgttgtagagacttccagtatgcattctcttctgcttcctctgttgtcaaccacaagtccatgttgttagggacaacagtgtgcccagttaaaaaacgatatttcctagtctcctttacagatacggtggccaatgaaagatataggctgaaaggttagctagggattctagaaaagctctctaaaggagactgacatgtaataggcttagcattttgcacctgaattctctccttccccctgtctggaatgcagacgtgatggctggagctccagcagcctccatgaagccataagacaatgtggaggaaagaaaccagtgctaaggatggcagagcaggcagatggtcacaggtctttgggtgaccagctattttgcctgcctggagatttgactatttttggagccggatgcagagggaggtgggaaaaatattccagctgaaattcaacctgtaggagtatttttcagggtgtcagggtcacttctttgtggagctgcctttcaggtctctggtatagggggcaagggtcatggcctcatggtgatgcccagggaccccaggtgctttggtctttgcagaccactttcttatgaaaaagcagagtgtgactgctctggcagaaagataaatgtcattcaggctgattcattattatacattcattatcatttatttgtggttttcctctgattttaaaataaatcaaaattaaaacacttttgcaggcccctaacagtatcatgggccccatgcactgtgcccagcatgcccaatggacatgtaggccccaagagggcagagagcaatcacagaaggacttgccctggccaacataggctggtctctctaggggcagcttcggaattgtgaattacccagagctgcgtgccaggaaatgtggacctaactcttgcctctgaggaaggcaggcaggcttggtttcatgtactgttgatgagcccgacatcctcaatgctcactcgagctttggaaatgacaagcaggattttcagaacaggattctctgtcctgtccctgttttaatttcagcctccttattccccatgtaataattccccatactggctcaattatttgtttaacgggtatgaattccagtctataatgccaaggtatcaaaatgtgacgtacctttactctagaaatctctaaattatattaaatctgctccaagatcgccctgccctacctcaccctctctgcctggttattgggagattcaaattctgtcattattggggatcctttcttgtcataatgctccagatgtcatcaaacaaacttgggcttaggtgatgccaggaaacctgggggggagcatccattgtctgcggtggctgctaccattgcaacttcgacacctgcagtctcagtgtgtggggggctctgggagctgctcagggcctgctccagttggggtggaccccacacctctcgtgatctgtcctctaactgtaggctccgctgctggaaatgtgtcgctgctctcatggccactgtgtgagctcccagtctcagcaaatgcacccagcaatgtctgattgatagggcaccctctgtgggctttgtcctgcttgctgctagctgctgctgggcctctcccagcctgggcctcctgtctcagtctgaaggccaagagacagcagcgacagcagaggaggcagaaacagaaaactctccgaggacccggggaagtcacaaggtggcttcccaaactctctagtgcagcactgtctgatagaaccttctgcaaggatggaaaagttctgtatctgtgctggtcaaagcagcggccacaagtcacatgtggctcctaagcaactgaaatgtggctactgtgactaggaactggattgaaagttttatctaatttcagttaattttaatttaaatgcccacaactgcatgtggctaccaggttggacagcatacatgtggaacacagactcctgatctgggagccttgaaagatgagccgtcactctgatgaggtggagggcctgaattgagccctgcggtggcactcggcaggtcttcagaggggctggtgacccctccaaggtgcacagcccctgggctacgagcagtggctagtcaggttggggtccctggcctctgccacgagtggccactagtggaagcctcaatgtctccacttccagtgggctctcaggcctcacatgcccatgccagggtagggggcctgtcgaggaggatgccctggcacccagagcttctctgctgtttgtcctgagggttcccttgggctgggggcctcaggtgcagggcacatgcagccggactgtccagccttgtggtatttgcacatgaactttcctgcgtggggatagacagccttattcttgtttgtgtaaagccattccaggaactattaatagttagactggcataaataagcctcaggtttggttcttgttagtgtcctacaaatccctcaaactttactcttttggctttttaagggagaagatttacagtatgttcaggcacaattgacaagaaacatacaagttgtgcggagatgagcagacccagggccccaggcctgagcctcttttctctcccatgccctgcctgctcaagttaccttgagcacaaatgatgtccttctgtgtgtgggatcacagactgagacatggggctgttcctcccctgaagtcacccctcaagttccccacatgattttactcctggctactccccagtttgctgtagtttgctggaccatgtgaccttggaggggctcacaaggcccagtgatgaagccaccgccagggctgagcctcagctcagccagctacttaatgcatgcatagcaagttacttaacacctactgacctcagtttcctcacccgtaaactagaaatagaggaacaattaccacagagagttgttctgaggatgcaaagagttcttgcatgaaaaattcttaggaaagtgctgcacatagtaggtattcaatagcattagctatttagattggaattagtggctttttgccatttactcctgactgtaggagctgttctctgggccccagatctccattccagcaatgatctctctcctccaactctggcattggaggagtaccacaatcctgcctccacatttcatttgctgacacccaggggcagcattaggtgtagagtgctggacatctaagggaagaggttcaattgtccatctgtttagttatttactcattattcaatgaatgttaattgagaccagtcagggcagctgagaagcagtgcggttgtgaggagggctgttagtaggggagatgcaggtgctggtgtgcttccgtgtatgaatatggcagctagtgcagggtcatgaagagggaatcagggacactctggggatgttaaaaactctgttgatgtggaatcagaatccctgggccagtcctgccttcctcttgctagctgtgtggccatgatcgagggtcctctttgatcctccctgatacatgggcgaggtgacccacagtggcagatgcttaaccatccaacatggagtcatcatcattacttagacacccttcatttggaatcacgattctcagtgtgaagggcacttcccaccatagaagcccctctctgtgagccctcagagggctgtctaatccataagccctttccctcccaaagaggcagcccagcgcatcactgcaaagcgccagctgagaagacgttctataaattatccaaagcctattctctggcacatccatattttggacctagctctgcccccgaagtcatataagcatagccacgatgggaaggatggtcataactcaacatgcccattcatataccttgagcacatatcctgtcccagagactgctgaattattgcatgagccccagctccttccacaccaaagcccttccgactgcatggacctcaccacttctgttcaagctcttccttcttctcatggttcctggaaagattctttatgtgctgaggtgttcagctacccttgatcttgtgctgccttccacagcatctacttggcaactttccaatgtcccacttcaggtgggcacagtgacctcctttgtctggtttttggcaaccatacctatctgttggacctgggcactgcactgacagccagctgacctccctgcctctctgtgtgggaacgtgctgcaaagccacatctctctaattctgtgtgtgtgtgtatatatatatcttttagagacaagatctcactctgtcactcaggctggagtacagtgaagcaatcatagctcactgcagccttgaacttctgaactcaagtgacccttgacctcagcctcctgaagagctgggactacaggcatgtggcaccatgcctggctaattttaaaatcttttttttggtagagacgagcgtctcactgtgttgtccaggctggtctcaaactcctgtcctccagtgatcctcccacctctgcctctcaaagtgctgggatcattctgaatatgaggtggtgacttttttaaaaaaaacttttttttttaacctaagtagaactttgcattatcgttggtgttgtcttttagatttagcccatgtattctctaatataaaacatgaagcttcatgtcatctataacttggagtggtatcccctttacatcttcaccagaagaccacttggatcagtgaagaccaagagcagagacctgtgacatccactagcgattgtcttcactgttgccactatcccagtgctctcgggcactgcattgaacacaaatagctccccttgctgcacaagtttcactgatgggggtaaagggggttatgaaacgtatcatatgatcaaatatgtgatagtgatcccacagacaaatggagcgtgtggggatgatttagacactcagccagccttgtcttgatggatacccatccttctctgctgttctctctttcctccatcctcaagcacagggagcttttggcgaggttagctaacttcggggcagctgtgaattagatactggctgtaagttacctccaacatccagagcatttaaacgctcggctgtcaatgattgtcattttcattgtttacatatagtcacatcctcagtttgtggggtggatgcatttgattcaattcagatatgcctttcaagctggccctgctgagctgggcctgaaaggcacatggctcatctcatctgcatgtgacagtctctttgaagtccccagaagtgcctgctcagagtcatgctcgggagggaagaggtaaggcacagaatgagtacagactgccacccagccgcaggaaaggtgactgcacaccagaggttcctggtaaggaggtgactcacccgcgactgtctcacctgtccaaagtgtgtgtcacctgctctgtgttcacccactgggttcatcagaggggcacttgaacaaaacaggaatgtcactggagaggggaacaaatgctgtccccaagtccttccctgccgtttagagtaacgcagcccctgtccgcacatcctcacccccatctgccctctgcttgccagaattatcagaatctctcaattctaatttcagccattctctgtgaaaatgaaaagttagtggcaggcaatggacaccctattgaaatagaaattgttcttcatatgtcagaaaagtcccagagtaatctgggagtaatctgagcaaactgattcaaaggattattacaatttcttagtcttctactgctgcaaaagtggcactctttgattctcatgtttgaggttctaattactacctcatgcaggacttacaagagatcagccatgctgcttacattgtgtgtagtgaatcaatgttattctgaagggcctcctggaagcagtagggattggagaatgtatgtcttttaacatgatcattcccatcctatgggggttgggcactcttaactcatgttgcagatgagtaaactgaggcttttgagagtttgagggtgcacagcttgaggcagaggtggaattcccagcttcatccaagaaatcacgaatctccaatggcttgcacacatccaggtttgctggatcctatttgtcaagaccacatgcagattaggagccttcaaacaaattatttccaagggagggcatctttctctgtaacccctaccctggcaattctccatggcctcagggagtccagccggaagctctgcaatgagtcctggggaactctcatctggaaaaaggcgctcatgacaggtggtgccaaccttccacggatgcttttcagcatctcttgggatgaggatacagaatttctctttcaccctgtaaatgtggtaaatgagggaatagaatttccagctttaatttttctgaataggattcaaaaatgaaattgtataaaaaggtatccagtgaaaaacacacacccatccccatctcccatccagttccctccgtaacccttttcttagtttcttatatgtcctttcagagtttctttatgcaaatacagtataagcaaaaaagaatgggcctttttcttttcttccttattttccacaaaatctatcaaaatgggttttttttgttttgttttgtttgagacagggtctcactctgttgcccaggctggagtgcagtggcacgatcacggttcactgcagcctcgacctccccaggctcaggtgatcctcccatctcagccttctgagttgctgggactacaagcatgcatcaccaggcctggctaatttttctattttttgtagggacagggttttgctgtgttgcccaggctggtctcaatttcctggacacaagcaatctgcctgcctcagcctcataatgtttttttttaatgttaaaccccttcttgtgttgagaggcctggcttgtgtgtttgagcgcagctgcctacctttgcagctgtaaatgtcagggctccaggagggctggctgggtctcccctcctcccctgttgggtgggtggggccctgagcttatccaggcatccctaggtggatggatgggtggatgggtaggccctggccttcagggaatgcactgtgtgtggtcttccagccccagcaaagtctcagggggcccgagcgggaagtcgccatcctcagggggtccgagtggggagtcaccatcctcacggtcagccgtggtttcgaattgagctcccaggggcggagactccattcccccggggaacaatctgatagccagaaatgagagcagtgagtgacttggacgctgtgtgattcaggagggtcccagtccctcagagtcgcctggacaccagattgtatttacaaaacagatggatgaggaaatggagattgggtcttcaaaagaattaacctcagattttatttatttattttaaaaattttaatttttcccaaggaccctttccaagtcaagaattgttttaaaaagaagcctggtgaaggcaaatgctgtctgtggccgaaggcaccgtgaggagctgaggctgacttatgtttctcctctgggctatgtgcgcctctaaggagttcacacactttaacccccttaggaaccctacatgatcatcctcgtttcttaaagaggaagcagagccagcaaacaagtgggggagccacagttccagcccaggtgtcactgggccctgcctgccccagccagctcctcaggagcacacggcaccccacgtgcgtgcaggggacagctgtcctcacaggaacagccccgggacctacaggacttcctggggtttaccctcagagcacccatgaggttagaatcacaaagcccgggagtcaggagacacagggcagctggagggaggtctttactgaggctactgaggcacagcagccccgtctagaggcctccccgagaggcacttcctgaggagtctggtggattttgagctgctttttaaacaaccttctccttagcatagacactgacactgaagggaaagaaagcaaatggtctgttcttagtgggaaggcaacttgctttcaggggaacgagtttgggggaagaggactggtagaagacacgactaagaaagtgagtaggagtccagacgtgtgtgattcatcctttagggcctctgtgtgtgatgggttgacttgtgtgtcccaaaattcacatgtggacgtcctcgcccctggcagctcagacgtgaccttatttggaaatagtgccattgccgatgtaattagttcaaatgaggtcatgctggagtcgggtgggcccctgatcccatatcactggtgtccttataagaaggggaaatttcaagacagacacacactcagggagtacaccatgtgaagactggacttaaacagctacaccaccagaagccgagagagaggctggaacatagccttccctttggaggtagcctggcccggtgggcactgtgatctcagacttccagccttcagaactgtgagacaatattttattgtttaagccacttattttttggtactttcttacggcagccctagcagatgctaatccagcgtgcgtcctgacagaggttgaagggggcttctcaagtcccaggtccagcttggtgtggttcagctactcaagagacatctgctgctaatggatgagcagtcaacctggacgcaggaaatcattttttatttgggtgaatacaatattctccttttgttttcacttttcctaaaagttaaatcaaggttcaaaagaaaatcgaggttcaaaagaaaaatttggtctttacatgtgctaaaaagaaaaaaacaaaaagactcatttcatctttatatgggatgggatccgtgctctggtgggctacagagtgtgtctctgtgtgggtccctgtactccgtgcgaggttggcggccgagccacggttcccatgtgagcaggacagcacagtctcacctcacacagagaacctcgcccgaacatggaactttcacccacgttgccattttcccgctccctttccctcctttgaggttcacactcgtctctccaaattaaaatttacaaagagaggagatggaggctcccaagtggccacaaagtcacattttatgtgagacctttttgcctcatttgctagttattgaacaaaggtgactctgaacctagcagaagcacgggttcaacacacagttcagaaaaacaggaaccatcaattcataagaacttaaagaaaaaaatagtttaaagaactgagaagttgccacattatagtgaaagaatgttgggttttggaaatgacaaaaacgagcaatcttcaccttgaaaatccggtggagtcagttacacaagacataaccgcacacaaacatggcatttctgatagtataatggcatttacagtcaagaagcttctttcagagtatttcatggaaagttattttagtagcaagggtagccttaagcagtgagtattcgtcaagagagtgaaaccttgacttcaaagtcaagaggcggaggagtgaggactcagatctggaggcgacctgcagggcgggtgcccacgcacaggtgtcccagctgtggacatcccacgtgcacaggagtgggccaaagagaggcccatggatccctgcccacctcagaaatgtgagcaggcagctggggggcatttggactctagccgggacaacctagtggccgggcaggggatgcaggcaccacaggtcacagtggtttgctacgagcgtcagcttttaaaattttaaataatcctcttattgtaaaattgaggacattatttgaagcaacgcaaaaaccatgtaaaaaaatgtctgtaggatgtgaatagcatgtttctttaaggcaatatctgaagaaaatataaaagccccaggtgaaagacaccctgggagcagaggtgcccctgagggtcggctgccccaggacagaggagggctctgctggtgcccaggtggcactgcctgtcttgatgccaggtgcaggggtttagaagaaaagacaaggaagaaaataaaactcaccaccgacattcctaccactagagttacccactgttcccagtcaggcatatttcctcccaatcctgtcctctctgtgtatttggtaattgcgtaaatcatctctcccataattaatctcctttaaaatttggaataatatagttgttagaataatataataatcatgcagaataatttagaataatgttgtttagaacaatttttgtagtcatgctaccttgcagtcattcataactcagaagaactctgcatttagaaggtctatttaaaatgtgccttctttgctgaagagttagttttatggtaaaaatccaataaaattgtagctaagcactgaaaaaaagtaaagaattaagctcagcctccagaaatactgattttatatatatttgctctggggaagattggtttaagaagacctatagcctgttaattgcccttttataaattgcctccctatattttttgccctcttttcccctccctccctcctttattccctctgtctcttccctttcccctccctccctcccttcattcctttcttccttctccttttcttccttttttttattgttgttctgggggaacttttctaatatcctggattttaagactttgatatatatgctgcaaatactttctctcaacctgtcttaactttctttactgtgtcgtttatattatggaactatttaacttttaagtagttattattttccttttaacacccaggttttgtcttgcttagaaagtctgttcctacccctagattcgaaaaatatcctcacatttttttcttctgatacttagtaattttatttttggtttaaaatgtcaagtcaagtagaacttatttttgtttataatttgaagtaagggagtttcattttaccctaaatgtgtagcaaattttcccagactatttattaagtcattcacttttttcctgctgaaattatgatatttaagttgataagttttatgtgttggggaggtgtcaaatgggcagtttccagttggaatgtgggattgggtagagctttgacacaacgtctgtgtctttccgactcccatgtgacttcagggcaaagaggcagaggaatggagctcagagcttttagagaatatgggccagaaacaggaaggagtcaggacctgataacgggaaccagcggacagtgaacgcagtggagggccactggggccggagcagccgagagatttcaggaggtgagcttcagagagcctcggcataaatggatccagggtgtggtcagctcagggaaagacagacaaccagggctgagcacaggccaggccaggccaggcagggcccccggagaatcacgttttagtatctgcatattgagaaagtttgaccttgagtgtgaaatgtagacaagcaacccaaataaaaaataggcctgattggggccaaaaacaaaacagattgatgaaaataatctcaagagtaggaatggacacaacctacaagaaggagactgaacccaccaagtgtggcgcttgagtcaaatcaaacgattagaggctgccaagtcggcccaaaccccaagagcgtgggaatctgggagggcaccgagggctgggctgagagcctcttttcaaggaagtctttccaggatgctgtacttctgtcttgccaccttgcaggccttacagtgagaccatgaagtccctggcactctccctgccggacccgtggccgatgttgatatctgctcggccggcctcacaggtgtgcgcgctgtgcagtcgcttagggcctcccctgcgcagaaggtcctggcttggtttaatgccctgctgttaccatcttaaaattcttaatggtttttgaacaaaggccgcacatgttcattttgcaccgctttgtaattacatgatttaaaactctgtgcttttctcttcctttttattaaaaacaagaatgtcagaaattgcccctttaaaactgtaaaacaagaaggcattaaactcttaatatttcaggtcaaatttgacactgtctctggacatgcaggtctgggtattggtgggccttagcccctttcctgctgagcccagaacatgcttctagtcacctagcataggtctctagggggcctctgccacaaggcagggccaacgccaaatgacatgcagttgcctttgatgaatgggactctccaccactgctttatgtaaacagcaggtcctgatatatgaaatgtggcttcaaagcaacttaaagaaatgaagggtcaaggatagaatatgtgatgagattctgataccatggagcctccagccccatggcttgctgtgcttgggctgtgttctctgtcctggaagggtccacagagagggcaggctgccagcaggaggcctgcctgctccaccagactgatgacacttattccacttggttcccagaactaagaggtcaggggccatgaaggactagttgcaggagaactctctgtcttaatttaaggcatgctctgtggagtggggctgttgggcagcctttccaatttatccacccatccctgggatctcttgggattgagaaactgagtttctccagggttcttctctcaccactcatatcctgcaaccttagggtcctccctgtactgggtatcagcctggtctcagcattcagggactcagagagaataatcagaggtgcatttctatcactgtgaggaccttaggctcaggccaataatgtaaagaagcaccctacctgggagaaacttactgtctagttgtaaagaaagcaccagggggccatgatgcccatcccacccatgttcccacccaaactctcctaaacccacagctcccaaacaagttctggattgtacagatcaggctccagccaaggtgagctcactgaggtcagagcttacagaatctgggagctcaaccaacatgatggcttcagagatgaaatacccagcacatccagctgcagttgccccataaggagcagaaagtttgctatcacttcctctgtactgtttttatgttcaggtgacctgtgggtcagttgttcgtaatgtggtgatgcctgtaaagggagcactggaggtcagggggtgccagtgagtggaggagaccattataaatactgtgtccccaaagggtgtacagtcaaataaatatagcatgggaaaagccaggttgacccaagagaaacatctttttctaaaaatctgcaagacttctcagagcctttggtcgtgcattttaaatatccaaatatgtgttttgaaaatatgtgaaacagcataacatttgtggtatatgttaaatgtagatgatggtggaactttctgtttttttcttagagaatttcatgggaccaggcttccaaaaaacacaaatgttttgaggacaaaacatatgaatattgtagaagattagaagcgataaattactataggcagaagataagtgacattggattgaaatttttaaaatgggaaaataattacaaatggaggagtggcatggtcagaggcggagtgcaggtgcctgtggcacatctgggctcactggctcaggcaagctgcggtggagcagaaggctggggacatgtgtgtagagtcccaactgtcagatcacagtgttgggttgggtctttcacctgcaggggcgtgtgtgtgtgtgtgtgtgtgtgtgtgtgtgtgtgtgtgtgtgtctgtgcacatgtgtgtgtgtgctgcttagagtttttgagcaaagtttggaatgatcaatgtgcagctttagaataatgacttggtgggaagaattgaagtgaggaaacactggagatttgtagccctcctagaagtcactttcagcatggatcttggtgtggcctggaaggaaaggacctggcttgtgggaggcagcagcagaatggacacatgagagccacaatcaagacagacgtggcagggtgaataactggctgaattgtgaaactctaggctgcccatatcacactgacattttgagaattcagaacagatggcaacacctgggcccctgcctgtgcagatgggccagaaaaacgtgacatgtgtgaaggtgggcatggggtggcagcagtttctctcgcccaagcattaagagtgttacagagcagaactgttattacggaattggtgaagcacctctgggggactccctctccttcccccaagtatatgttggctaagtagccaccaataacaaatggagacacctgcatgctcctgcagccactgcagtgtggccagctcctctgctgggctatacacgtggagatcgtgtaagtgaccagggccaatgtctctggcagccatggagaaacaggtggcccagcccggccctttcactgcccgtgatggacagcttgccatcgctggtcaatagctgcactcccagatagtattaggtaatatataattaataaagaatattccagttgatctggttcttttaaaacaaggaaacttcttgctatttggtacccacaaattccactactccctgaattgtatgtcctgaaatctcacaaatttgcatgctgacattgttaataaaagaacaggagataatttaaacagccctgtggtttggaagtcacaggttctgctgcttcatgttcatgcacgagactaagagcctttgaagaagatcacttcctagaccaaggctttatgtttggattaaatgcagctcctccagatcatctcccgaggagattcagccagcctctgttctctctactatccccgtcttcttgcctcatcccatgcacacatttatatgtgttcacatttatgcatggacatgctctagtgtgccctctagtgcagacattttatgcatgaaactttaacccctcttgcatcaaggcatataagcagaagagatgagtggaaagattttagggcttggaagggcaaacgtgatagtcactgtacattataaagaacaccaaatgacagtgtgctttggaatatactactaggaatgtttctgctttgcaattggaaagtaatgacattgaaaagaagtgaaaaaaatcacaggtatataattcagcaccaaattgatgaggacacagaggtgaactagaaaggcatcccagcggaaaccacttacagccccataaaagcaagatctaagcaatggggatataaaaaaggaagggaaattgatgaagatgacttggggtgacgtgacctggagtttagggagggacagggacttgccttggactcactatgggtgctcatgaaggaggcagcatttggacaaggccctgagaggcaggtggatttggatgtgcagtggtggtccgggtgtgtggagtgggggtcagcatgtgcaaaggcatggaggtcagcaaaccaaggctgagagcacaagaggttcgctgtgtgtcttccagctgcccagtgagcacatggaggtaaaggtgcacaacttggtaagcgacaggagtttgtgtggatcaggcctgctgtgacataaatatgcaaatgatgtggtccctcgtggtagcaccctcaggatgacgcactcttctaccaaaacatggctgaaaatttttggtgtgtgggggtgtaccctgggagcccatttagaagctacagtgaaaagagccctcattgcttcagctttgagccatctgggccctcccacctggctcatttcacctgacagtttctaaaacttctcacaaggaatttgtcggtttattacacatccatagaatgccctgaagagctattccaaaagaagagcttgaaagtcgaacgctaagcagaaaaacagtgacttccaaaccacagggtttgttcgaattatcaacttagtcctttattaacaacttcaaggtgcaaatttgtgagattccagacaggcagttcaatgagcagctggattttgctggttcccaagagcaaggaaaattcccttgttttaaaaagccagatccatttggaatagtctttcttccccacatattacagcatgaacgtgactctaaagtacctgccgagggtctttctttttgtgacggtgggcgctgttccccactgtcgtggacttctcacagcgctcagtgtgcattcggttgcttctctccataacgcctctcagctaactgtgctgtttctgtgctcctgggttgttaatgttcaagtcttggctctataccattttccttatcatttaggattccactgggaagacatcactaagttgtgaaatcaaacttcatgagttggctgagatcatagggttgggtgtcctctgagcacttgcaggctgggggaagacagaaaacctggacaacttgcaattgtttgcaacaaagtggaaaaactaaagtagttttgatatgtgcattagtttgcttggactgctataacgaaatactacttggtggcttaaacaacagaaatttcttttcttacagtcctggaggctggaagtgcaaaaggaaggtgtcggcaagatcgtttttttctgagagctctctccttggcttgcagatggcagcctgctcctggcacagtcttttctctgtacgtgctcatgtctgtgtcctgatttccttttcctagtagggccagtcaaattggattagggcctaaagtaattatctcattttactttacttctttaaaggccatatgtccaaatacagtcacattctggggtgctagaggttaagatttcaatatataaatttgcaggggacacatctccacccataacaatttgtttttcgtaatacgtttaaaatacccatttctgggctggatgcagtggctcatgcctataatcccagcactgtgggaggatcacttgagcccaggagtttgagaccagcctgggcaacatagccagactctatctataaaaaaaaatacacacacacacaaacttggccagatacagcggtgcacacctgtagtcctagctgcttgggggactgaggtgggagggtcgcttgagcccagaagtttgaggttacagtgagctatgatcatgccactgccctccagcctgggcaacaaagcaagactgtgttacttaaaaaataaaataaaacaaaaagacccacttccatttatttcacccatggataaattgtgtagcaagtggttaggtgaaatgtgaaatgtctggccaattattgtcatcatgctcaattatagagacacagtatgctcccctttgcattcttcattgctgattctgtgctttacatctggcagctacaaaaatttagtattttgctagcaggtgcatcaaatctatttttggtttcaaacaatacactttttgttttcagcgattctgaccagtagtcaacaattgcaagtatgtggaatgtgattctcctgctttgggaacaagggagctcccagttttgtgggcaggatccgacattcccatcataagggcggcctcacctgtctgtacctctgacacctcagtcagagcccttggagtcggctaggccagttttggccctccttactgagacctagtcattctgtagacatacttcattctcccaggcttgggcttctggttcaacctgtggctctgtcattatcaccagaagatatccatctggcccaccttctgtggcttttttcccatgcacctttcagactaaattgtatacgctcatcctccaaagggttggctgtctttggtggtattttggcctgagttctgccttggatttatgttttttgttacatatatatatatatatatatatatatttttttttttttttttttttttttttttttttgagatggagtcttactctgttgcccaggctggagtacagtggtgtgatctagattcactgctacctctgcctcctgggttcaagtgattctcctgtctcagcctccagagtagctgggattacaggcatgcaccgtcatgcctggctaatttttgtattttcagtagagacggggtttcaccatgttggccaggttggtctcaaactcctgatctcaggcgatccactcgcctaggcctcccaaagtgctgggattacaggcgtgagcctaccgtgcccagccttatttcataatttttgatcgtaattccacccacatgttctattcatgtgaaatttactaaggtgagaccaagtggagataaaaactatctaaacgaaaaacttaggtctctctttcagacttttttttggttttatggtggtaaatacaacccacttggcctttcccctgagactactggttcttttgtcactggagtcccagagatcagggtttgaactagcccaccacttactggtcatgtaactttgggcaattcagtttgcatccctaagcctcaatgtcttcatctgtaggatggaggtaaccataatgcctgtctcagaggctgctgctagtgttaactgtgggacacaacacagagtgaggcacagacgaggtatgcagaaaacatcagcttcgtggttttttactcttctgcacttgctgtagcattctgcaaaactattattcctttcctagactcatgcccaaagttacggaggacccagcaaccatctcctgcagcccctggaaacctcttgactcttctgtgatgtccccagtgatccagcagccctggccttcttttgatggcttgaacatttggtcttcattgaacagtttgtatattggaaacttgccagcctccatccacattccaacctccgtctgcatccctcggtacaaaatggttcaatctgtctacctcctttcacattccaccaagatattccaaggcccagggttcctttgaccacctcacacctaacaagttccctcactgtctctcactctcccctgaagattctaagctgcctctgtcctgctaaaactgtagacctgagaatgaagtaaggtgcttcaggtgaggcttgatcagcccagagcagaaaggggccacctcctcccaccctataagaccctattagtgcaccttggagccctttgcttggctggtggctacaatacacttctgttaatgacggaattccataacatttttccccattaatttctgctacaaaacacaaaagtcttagccaggtgtggtggtgcacacctgttgtcccagctactcaggagtctgaggtgagaggatcgctgagcctgggaggcagaggttacagtgagccaagatggcgccgttgtactccaacctgggtgacagagggagaccctgtctcaaaaacaaaaaacaaaacaaaacaaaacaaaaaccaaatacacacacacacacacacacatacacacacacacataaaagtctcatattttacacttatgaagttaggtgggttttttttgtttgtttctttgttttgttttgttttgttttgtacccaaaagtacataacctactactacctacctttttggtttttttttttttttgagatggagtcttgctctgtcacccaggctggagtgcaatggcgctatctcagcttactgcaacctctgcctcccaggttcaagcgattctcctgcctcagcctcccgagttgctgggattacaggcacctgtcaccacacctggctagttttgtatttttagtagagacaggatttcactatgttggccaggctgattttgaactcctgacctcagatgatccacccgcctcagcctcccaaagtgctgggattacaggtgtgagccactgcgcccggcccctttcctaaggttttctaaagcatgtttgtggcaatctatcttagaatcttgtcaaaggtaaatacaaggttcagggtttacggagccaccttctagccctttaagccaccagaattgctgatgtcttatggactcctgagaagtttgtggtggtgattcttagagctcagctcccgactgctggactgtcggtcactgggcagaaacagaactcagttctcatcacctggatgccgtttcatactctccaccctctcctgggcttcagttgccccacacaatgtcagtctctttgtgatggttagttttatgtgccaactttgctagggcatggtacccagatatttggtcaaacattatcctggatgtttctgtgaaggcactttttagcagattaacatttaaatcagtagattttggcaaagcagagtcataatgtgggtgggcctcatccagtcagttgaaggccttaatagaaaatgatgggctgggcgcagtggctcacgcctgtaatcccagtgctttgggaggccgaggcaggcggatcatgaggtcaggagattgagaccttcctgactaacatggtgaaaccccgtctctactaaaaatacaaaaaattagccaggcgtggtggcgggcgcctgtagtcccagctactcgggaggctgaggcaggagaatggcgtgaacccaggaggcggagcttgcagtgagctgagatggcaccactgcactccagcctgggcgacagagtgagactctgtctcaaaaaaaaaaaaaaaaaaaaaaaaagaaaagaaaatgacgaacctccccaaagaagattggattctgtcagctgacccaaactgcaacagggactcctggggtctctgcctgccagcctgccctgtggattttggacttgccagcccttaccattgtgggaacctaatccttaaacaactcaatctccactaccctcctcgcccttctctctctctctctctcacacacacacacacacacccacacacacacacccacccacacacacccacacacacacacacacacacacacacacacatccaattgattctgtttctttggagaactctgactaacacagtctccttctcagtattaatgtttttttcttggacagaaaatatagataaaatagaagtctagaagttctgttttctctcacgaccaaattcttctatttctcttttaacccattcagatttgtgagtcccggagcgtgctttgccagggctctgttgagttccacagtgcattgagcaccactatgtgggaggcactggctctcaacaggcagcaggcaccttttccctaatgaactgtctttccaggtttcactcaagccctttctatcagacttctaccatgcagctctgccaatttctttaagcatctctcccttcttcctgactgtcctgaccaggaaactccctaatctctaatatctaaagtcatgaagccaattgcatcattagatgcgcagtatatataaataacatttacttacaagaatatttttatagaaatgtatgtaaacatacttacatacatttctataaatacatttaaattcctaaagacttgtttgagcaatttaaaaaaaaaatgctccagtttaacttcctactacaattaggaatttggggcagggtgcataattgccagtgtactcacagtgactgcaattagaatgtgctgtggagtcagaggaactgcctgacagtgccgggcagttgaccctgggctgggttcagagctctccagtggccactgagaagtaggagagtgtttcctgcacaatcctgatttcttgggggaggaggtactactgcacgctgctgggaggagcctctgaaactctcctgggccaggtctcctcccgtgcttcctctccctgaggcagcctcacctcttgacgcctgtccccagcacacccttctgtagctttcctctgactcacccctctgtgtgtctttctctccaactcggggtcctgtcacctaggcctctctcctttttcctaggtggctggcagttgctcttcccttggttttctctaatttgatctctttcccacccttccagtctgccacagtcacccttgatatccgcagaatccaccctccttggaagggatgaggaagggggtttatataactcaatttcatttgtaatgtttcaaatggtattttttttctgggaataattggcgctggattctgaactatctttcctgttgcaaagaatgaaatcccttctaggtgatggggcttgatctttctctgttgcaatagcagcgatgtccaaaacaatcaatcagaggcattttctaccgtacctgagccattcagtggtttcgacctctgctccagattacccagggttatccagatgggttaatgcgagtccttagaatggtgtttcccaccttgagagtgggttgttggctaggtgtgtgggggagctgtttgtctacacctcagaaacgctcacaacagcaggttccagggaaagtccctgggtgtccagtaaaagctgggtcgccctccctagggggctctgagactagcagaactgatggccccataatttgagcacaggtatgcatatttcttaggggttggtgggcagactcattcatgttcccatcccaggggtgcaggggacccttctcccttccccacatcagcccagggccacagaagctcctcaggaggcaaggaagggaatggagaggacaagagtgcctacagagtgggaaggagacaagcattctcaggtatttatccagggtaagggcaagggcttttctgcagtccaggacattagaagagtcctgaaccaagaactccacccctgccccgatatcagctgtttttattgactgagctgttggagaacagttttggtgtgcggaaacagtgagatccctaaccctacacccctgaacccagcagatatatccacactgaccagaaaggactggctaaccacaagcctgcctgtgcatggcagggaaaggaaagccattcttgagtaaatggtgttcaaaggttgggcaatatatgtatatggtgttctcctgtggacataattgtgcacaagggtcagaagaaattgctttcattgggcaagctacttaacctgtctaaagctttgtttttttatgatctgtaaatgaagacagatcctatctcatggctctgcacgtcacacagcgatagcagacaggtaattaggatgcaggtagttagcagacagcctgggtgtactttagctgttcaagtttcctcaacctggcctcctagccatgacctttcacagaggtgcaaatcatctatgagtttgcacagaatcccctgcaaggaaatatgttcttgttcttgacttacatttgagttggttggtcttacagttaaggcggaggtcatcactcttaataaaggccattttaagtggagtgacaagtcactaagggacttgttggcattgtttacttcttatccagggctttccaagaagggacagtgtgtctgagtttttatcttatgaaggtttcccacctgcagtttagtttactattattctaagggctgtttataaatgaactagcttgtctttgcactcagggtaattcacagatttgtcagtgacttcattgcagctgtgagctttacacgaaccttgcaatccgccttgaaaaatgaaactgagtataagtggggaccaaggaagaatgtttttgagggaaatagaaattaccatcctaaaaatggttccttctgtgtgtctgctgatagaaacccttgacctctttagaaacaaccgcaaaattattcactacaattatctgaatctcataaataaaataatgattacagctgcatggaattattcaggtctaaattcatataaacatatccctaacaaatttatttatcatgacaggaaaggaaagcatagctttgtgcaccccatcccacaccctccaccccctacaaattttactaacactgtttctgggttcagaatttttttgcctgagttggtacctcaaatcacttgagttaaactgcaaatgaatcacacataatgcagataaaatgacttcatgccctaatttctagaacgtgacctgaatgtgaactagacattcgttttcctaaaccccatgagacccaggtattcttgacatgtgtagagaggattgaaggggcccgaggctgtctgtcctctctccgtgggcctggctctccttggaccaaatcgaatgcatgggaacacaccccccagttgtctttttccttcggtttatataattcctggcatgtgcctttcaacactccgtttatgttagaagtttggtattagcctcggggctttactcttgacactgctactaattctctactttatattcgtgattgcccttctgaaaggagaatcttgtttcaaaattgcacctgggcattttaaagtaaataggatgcaaatccttagttggcctcttgtgtacattaacttcagagtgaagaatgaatatgtaagacagtgatgggggatggggagttgagcaaggaaaataatttgcataatggtgtttgctccctggtgaaactgaaacccagcctgtgtgggtggggccttgtttccaaacgtcagcgctgctgcccacgaaggcctgcaccaacgcacggtgccctccgggccgcccacagaggccggcgtctggccaggagcaggggctggggacagcaagtgtgaaaccagctgaagcacctgcagctcaggcgggctgcaggctccctgctctccccctgtgaagaagcacacattgttctttcttcccgcacatttgaatctctcagtggggtctcattttctgtgacatggcaaacctcaaaaaatgggagtaaatcatttctaaagagcttagctaggcatggtggctcacgcctgtaatcccagcactttggaaggtcgaagtgggatgattgcttgagcccagaagtttgagaccggcctgggcaacatagtgagacctcatctccacacacacacatgcgcgtacacacacacgagcgcgcatgtgtgtgcacacacacacaaattagccaggtgtggtggcatggtaattccagctactctgggggctgaggttgggaggatggtttgagccagggaggtcgaggttgcagtgagctgtgatggcactgctgccctccagcctgggtgacacagtgagatcttatctcaaaaaaaataaaaaaatcaaaaataaagagctcctgatttccatcccccaccgagaatcattttctgagtcagctggagtgtttcagagcccaacacccaaggagcagtgcagggatggtgcccagttacaggggacaactcagctctgaatgttacaaagggcacttcatggaccaccaccttttctctgcttgctctgtacccctaaagtactacaaggcatttttggttaataataatttgaatactatgtgatcttgtagattctactgcgtttggctagctaatgtctctaagtagcaagatgatttattttttctggacaataccaggactatatgctgatacaggactggcttgctctaaggatcagattttccagtgtaaaatatatactccttatagggttgtaagagcagaagcccttcatagcctgtttctttttgctctctcttcagccagcagttggcctggatctttgctggtagacacagggaatgttctccttgacgagtggttcccaccctggcagcctcagatcccaccatgttggcagggatgctgaaatccacctgcctatcagcctttgtaaataacaaaaatcacaagtggctctagcatttatgtattctatgatattgggactcgtgatataaataatacaaatgcttttacatgcataattcaatttatactatgttttatctttaattactggataataaaaacataactactctcaggaagtgtgggggattgtgactcaggctaaggtgagcctcacagcctggaggctggctttagtgctggctgggagagctgcaaggagatggcatatgctgccgatgaaggtgttctccaggaattttcagttagaagttttgatcattgttcatttggcctcaggatgaacatcatggtactgctcttcattctctataattaatatacttttcaccgtcaactttgcatttgaaagtatttattttatgggaaacagtgaaaagtagataattagcacatgtgcaaatctgtttggcatttgtggggtgtttgccctgaaaacctatggatgaagcccaaagacaggagctggggggtttcatttagttaacttaaaagttttaattggtctgtgttactcttcttgttacatatttttttaaggccctaaggtgagcaagttacattttaaaataaggaggaaaagccagttttaaaagtagaattgagtcattgcatgtgttttttttcccacaaacattagctgtgtgattattatgtcccaggcacctaaggaatagtgcccttgtcctggggaagttcacagtttggaaggggagatagttgggaaaggtaatgtgaatattaacactcgtgtttcctgggggccaaaatgttccagcttctgggccaggttaattatctgaattatcttatttcatccttacattgggaaccagatgtccccaatgcccttcagtgatttttttggtggctttgaggaaaaatgaggcccagagaggttatgtaacttgtccaaagtcacacagcaggtagatttaaagtcaaacagttagctcccaatgtgcacactcttaattaccatgccactaaaccagactctgaacaaagcactctgggagcacagagaagacctctgagggtctgtctgtgtgagtctagggcatgttcaaagttaagagctgatgtttagctcagcaggaaagggctggggcacagtgttggatacacatatcaggtggcatttattgctgatgacagtaaaagaaaagtgtaaaacaagataatttgtttacatttcaagatacattaagtttttttttttttttttttttgagataagagtcttgctcggttgcccaggctggagtgcagtggcgcaatctcagctcactgcaacctccgcctctcgggttcaagtgattctcgtgcctcagcctcccgaatagctgggactacaggcgtgtaccaccacgcccggctaatttttgtatttttagtagagatggggttttaccatattggtcagtctggtcttgaactcctggcctcaagtggtccacccacctcggtctcccaaagtgctgggattacaggcgtgagccactgtgcccggcctcaagatgcattaagttttaaaggcccctggttatttctcgtcttctgagatgtcattccagtgtgacatggttaacatcagtgaggatggcattcctgtcccacacagtaaaatgtcacctctcacacatgtaactctgggtgtaaagtgagtaaaaatatgagacttagaagaatatttcatcatggtatgctgactggggatttcacttactgatactagaaaggttttgcatttcagaacacgatgaaataggtaatatttatctgaaagacgcagacaagtggtggaggaaccagacacccccagtgccatttgctggcttttatcagacagaaagcagaaaggagaaacatgttttatcccatgagaaggaaatattggcttgatgcctaccatgcccagccttgcactagacatccaggtagctgctccatggagaagttcacagggtggtcaggatagcacagggaggaggtaatacgcttgagggaagtccaggagggactcagggagtgtaagccagtaggggggtgctcctgagaaagggaatgaggctgtgccttgaaagactgattagatagaggaggaagtgaagcatcagaggctgcccaacagaggcaggagctggggctggggtgggcaaggagaaaatcacgccatcctcctgtgtggacagtagagtttcatctgctgagggcagaggccatgttttatccatctctgtccccttctatgtccctttttctcctcccttccccattccctggcatcatattgggacttgttaagggctgaattgtgtcccatcccaaattcgtatggtgccaccccaactccagtaccttggaatgtgaccgtatttggagaaagggtctctgaagaggtaattaaggtaaaatgaggtcatatgggtggcctctaattcaatatgacttgtgtccttataaaaggagattaagagcacaccaacatggcacacgtatacatatgtaacaaacctgcacattgtgcacatgtaccctagaacttaaagtataataaaagaaaaagaaaaaaaaaggagattaggatatagacatacacagagggaagacccacatgacaacatagcaagtaggtggtcatctacaagccaaggagagagggaggcctcagaagaaaccaccctgccaacaacttggtctcagacttccagccatcagagctgtgaggcaatacatttctgttgtcagtctctaatactttgttatagtagctcaagcaaactaataatccagtgctcaacatatttttgttgaataaaagcacaaagagattcatgagaagagggaaatgttgcatacttagggtaggagcaaaccacagaggtctttctcagcctgggcaaagaatgtcaactctgtgttggagccagtagggagctctgtgggtcctcgagcaggaaaatcccatggcttaagcagtgtttcaggaagactgggatgttaggctccggagctctgagcaagtcagatgggactgggagtcataagaaggcttgactgtggctagtgataaccaatgagcactggaaacatggaggggaatctttcctcccttttatatcagggttctctcctagaggagcaggtgaggacctctgatggaccaggaaattggaattctgcctgggaggcaagcccatggaggccctgatctgcttggacagagagtagctcccttcacctgtaaaatgagagtgaacgagctggtgtctaaggaattcagaatccacacccatggagttccacagggtatgtgggattttagggggaccagggtgtccccagtgcaagaaggaggctcccaccaaggggctgcagcactgcagataacccccaggggtatgaaaagaggctgaactgggggcctccacagtcagaatccatccattgacccaggatgccaggaagggggaggcccatgggcagcagaggctcaacgaactccgtggcctgacttggccactaggttttttcagctcttcagccactgcctgtaggaggctagctggcattccttccttggcccttagcttgcatggatcggggtttcacgttaaattctaagcccaataacatggctctttttatttaaactcagtgctgcacaatgatgaatgaatgaatgaaagatcagggcagatgaactgtcaaacctcagcagttgcccttatagttagaggtgtttctgtgaagcaaatcaaagcttatagtatcaagaactttttaaaaaagtacactttgatccaagttggatgttatttctaagtgtactcagggtgaacacctcttaaaaccccttattatgtatgctgagctattctgaacctcagtgagaaatcagtaatgtcaagaaacctatacataattatttgttataatataaaaatccagagctcttcaagcattattctatcctagttggtcagattctgcaggaatctgagcctgaaggaaaataaattccttgagttgaagaaatttgtgtcttgtaaaaaagctgaatgagaaataacgttaaaaatggaaggaggcctaatgatgatattatgccatctcttgtcattacttagtcctctgttgtttcagtcatttaatctggttttctttctggatgctttaacttccatcttaattttccttataattgttgtgcaattataaaagacaatctgagggacccgccttgacagcctggggtaatatcactgggagtaggatctctcagaatgctaaggagcagatgcactaagagagctgcatttcactccattttattggatcttttggtatatacgtttctgtgactttagttcaatgggatggactgttgcataatactgagggctatatgaaggaggagtcgtctacacttgtaaaaaccttcttctttaggggtgggtagtgtataattgcaaaggcatttctgatttaattaagagttgtttggttggccgggcgtggtggctcacgcttgtaatcccagcactttgggaggctgaggtgggaggatcatgaggtcaggagatcgagaccatcctggctaacacggtgaaaccccgtctctactaaaaatacaaaaaattagccaggcgtggtgttgggtgcctgtagtcccagctacttgggaggctgaggcaggagaatggcgtgaaccctggaggcggagcttgcagcgagcccagatcgcgccaccgcactcccgcctgggtgacagagtgagactccgtctcaaaaaaaaaaaaaaaaaaaaaagagttttttggttacaagtgacggaaaactcaattcaaagtggtttaagcaaaatccagagttttaccatctcatgtaagtgaacaatctaggaaaagggcgtcatacatacagctcaaaatgaagtcaagatatttcagatctgtcttctcctcctggcccagtttttaatgctttgaccccattctcaaataaactcaaccctcatgatcccgaggtggctgccatttgtcctttcaggtccaaatccagcaggaaaaacttttgtcacagcattcctgtaaaaggtatgaggttcgccctgattggaccagccgaggtcacatgcctacacatgagccaatcacagtggataaaggactgtgatgtactcattaatttacccgccattatctccactcctgtcctgagggtggagttatgaagcttgctaatggggcactaggatgtccactaggttttactcagtgacataggtgacccactaaatttaagcatattggtgtgcaaaggaggcatttgttgacttgcaagtagacacctctcacttatttgtcacactcgctcttccttttgtaagcttcctgggagagggatctcagtggctttcaagatcaccccttgcaaattaggcatcatgcccatcattccatcccctgtgtgagatggcggcagaacagttcctattcagacacctgccctcatgcctcttcccccgtcctcccagcagccccagctcctggttcccagcatctagctccttccttatcagcacagggagttgctttttgtttgtttgtgtttgagaaagacttcttatttcgtgcatgcacatttcctttctgtgaagcagactcgggagctttgcctttctgacttattctgtgcatcctatcagtgaagtcagtgagtggcttcaaaaatgcttgctttctttctttttcttttcttttcttttttttttttttttgagacggagtttcgctcttgttgccctggctggagtgcagtggtgcgacctcggctcaccgcaacctccgcctcccgggttcaagctattctcttgcctcagcctcccgagtagctgggattacaggcgcctgccactgtgcccagctaatttttggtatttttagtagagacaggatttcaccatgttggccaggctggtctggaactcctgacctcaggtgatcctcctgcctcagcctcccaaagtgctgggattacaggcatgagccaccgctcccagcattttgtttgtttgtttgtttgtttgttttagacagagtctggctctgtcacctaggctggagtgtagtggcgtgatcttggctcactgcaaccttcacctcctgggttcaagccactctcctgcctcagcctcccaagtagctgggattatagtcacccaccaccgtgcccagctaatttttttgtatttttagtagagactgggttttgccgtgttggccaggctgatgtggaactcctcacctcaggtgatccacccgcctcggtctcacaaagtgttgggattacaggcatgagccaccgctcctgacccaaaatacctttttctttttttttttttttttgagacggagtctggttctgtcgcccaggcaggagtgcagtggctcgatctgggctcactgcaagctccgcctcctgggttcacgccattctcctgcctcagcctcccgtgtagctgggactacaggcgcccgccaccacacctggctaatttttttttgtatttttagtagagacggggtttcaccgtgtgagccaggatggtctcgatctcctgacctcgtgatccacctgcctcagcctcccgaagtgctgggattacaggtgtgagccactgctcccggccccaaaatactttctgatgctgataaaatgttttgtctactcttatgcccaaggaacagttcctcccttagcagaagttagtggttaaagcttcctctatgtttgccagtcaagaatgccacagggccagcctaagtgtccatgagtggatgagtggataaagaaatgcagcacacacacgtatatacacaatggaatactattcagcttttaaaatgaggaaatcctgacatttgcaacaacatggatgaacctggaggacattatgttaagtgaaataaattaggcacagaaagacaaacaacacatgatctcacttatacgtgatatagaaaaaagttgaacttacagaagtagagagtcgaatggtggttaccaggcattggcagggatagggtaatggggagatattgttcaaaggatacaaaagttcagatagataggcgaaataaacttaagagatctactgtacaacatgtgactctagttaatagcaatgtattgtattctgaaattattgagagtaaattttaattgtcttcaccataaaagataagtatatgtgaattagctcaattgagccattccttaatgcttatttccaaacatcatgttacacagtaaatgtaatagagtttttgtcaattaaaaaaattaccaaaaaataaaaaatgaattccatagagacgttctctccaggaagggtccccttcctagatctgactactggttagggttaatcaatgccccttggcaaaacaaaaccaaccccacatttcttcatctcccatgtccaagacacatgcagtgagttctcagtgtttactaccagcacacaaatgatggctgctttattatttggtgacctttgttgtttgctgtgattgttctgttcagttttagtccctcacagcactttcggccatttagaaagacagtatttgttctgctagagcatttgcaatctgtttctgattagcttaactggtcttgaccagtgctaagttcacacttcagctttgatttatgccgtctctatctgcagatatgtttcttgttacactatacaagaggaggcctcttcttattgacttcttattttcatgtgaacgaggtaataggtatcaggaataattagacaaggccatacgcgctaatgtcataggagactgagatatggagagtaaataataacaaaattcctgattactagggcatagaaaaaaaatcataggcaactccccaagttgataatcccaaatgtctaggcgtccttctcaaatagggaaacgtgacattaaaactactcaaaataaatgagactcagtggtatttataaccatagataaaaaagagcaagggtcctggggaactgtgccaaggcccagccctttgattcacaagtatccacaaaaacagactgtacgggctgctttcaagagaaaatgtggccatcaaggtcaacactggaagccctatggccactcattcattccatctcattggccctgagcctttcgaaaagtaggcagagaagaagcccaaagaacaacatggcaggcaggttaaggaagaaagcagagttcacagacatcactaacaatttcgtaatgacctcatgacttcgctggaaggattccagtggaggcgtcaccagccctttgtccacctcttaggctgagaacctcaaaggttgcccacaccttgaccacatactttcttccttttcttacacaatcaagctctgcaccaaacattagggggacatttgcattttcattatattcatgcgtatttctagcaaaatacaaattcttacaagatgttgacttgtacagtgtggcaaggaatactgtcatacagttgtgccaaaaacaagcccatttacttatttttttaaaaattaattatatataattcttataaaataacaaattccatttatttcctcttgatctctgtcatcagagacatttgaaggtcggaggtgggttcaattgaaagacataatgcacttgacaagttgttgtatgtgtgcattgtgaataggccttaacagtgcattcatttgttttattttttcccatttatacagacttttgttctgctcttagataaaatactaataaacaggaagttgaaaaaaaaatgtggtgcaattgttctgaatgttgtttttcttgcaaggctttatgggctacaccacaccatcctattcaaagcagtccctgtaggtggtggtgttaataaagaaatgaggctgcccagggccgcctgcctgagcctctctgcagctgctcacctcctgctgaggcctctgccttcagagctagtggggcctgctcacacattccagtagtttcctctttatttgtcctgaaccaagttgtagaatttaaaggaggtgaagtaaggcgatttctatggaaaatatatttttcttctttactcctcatgctgagtgcataagaatttattatttcccctgaatgttcaaagtggtgtgtgtgtgtgtgtaaaagaaccaggagcaaacaatcttaataggaatgtgcgatcttgtgtttatctttagcacacttaattagctacaacccgggactgttgccatttgaacaagttgttaagaaaatctgccatgttttgctcttttttaaaaggaatgactttaataaccatagcaacacttactcagttttgtgatccactccaagattatgggagcaagaacagatactcctgaaagcaaccctcacctcctcccccgccccctgccctcagcaagtcctggcctgtgtgaactgaagggtttggaagctctggtttctaggagtgcccagaagctagaaagactagggtgtactagttattgaggggcagttgtcagtggcagtgtgggggcaccccagttgttattcgaggcactgcattgcttttttgtctcctctgtaagcatcctgcctcagtgtcagggcttgcagaactaggcctggagttatgccccctacccaaccaaggctttgccttttgccccccactatggtgccacctacttgggtttcccacagttggtagtgccaggcaggaagcaggagtgcaggttgcaggaagggagagcagaggaaacagaagttgcttaggagggagttgggcaggctctgtccccagcagatccaagggtccctgacaaagagaacacctcacctccgcccctccccagaggcacacagaatgccccctcccaccacctccaggctgttaattcacacccacccaggctgcccccaggctccccagacctgtgccagtcaagcctggcctgtggctgtgacacctgcattaccccagacggttgcctgacctaggcctgtccttctatctgctttgtttttatgttgattactaggtgaagcacagtgttaaaaacgggaagaaaaggctaggaatgcagttatgggagtgtgaggctgggttggaataggtgggagaaagtccagggctgagtgtgtggaccctgctctagggatctgaccggctcaagctcccaggccattaaacaaagttgttaatgaaaaaaaaaaaaaaaaaaaagggagagagtaaacaaatctctcctctgttattctgcacctggagaaaagtaaaccccttgggcataataggctgtcaccaattagacatccgggaaaggcttttctgggtttagcccttttggggaagcatgggggtagatgtaagtgtgtgaaccttcacccaagttctggagaaggattccagagtgaaagaggtttccatgctgagtcttgcatttaagggaccttccatggcatagctgcaaagaaacctgaattgcccaggattaaccacctttcctttagacggtgagcagtgtgtttcacgaacacattacacattttagggttgtctatggaggtatcggcactttcattactatttttaacattttattctctgttcagggttaagaacttcacccacctaagtcagctcctgatacaacatggaatgttccagcaatgaaatgtgaacttaagatatttggattaaaaccccaaagttgagtcaggtttaaatattctgcaagaagcagtgagctccttttgtctatttgggcacagttttcgtgaattatttaggcttttcttagatgcctgagctccgtggttagacagcagataagttatttttccctttaatgctgaggcattttcactgatttcagtcttactcattagaaaattctgtgctcacccacagctgccagggtttctagaacacaacaccctaccttctcctgtagacattttagtccgtcctcgctcctgcactgtggctttcacagtcaaatgtgagttgaccagccgtcatttgtgagctgtgagcggtatttttggaacttgcccacccccgttcccccagagtcctgtggaggtcatgctcatgggttctgccaccgggacaggaaagtttggacattactaccaaaaaaatgcaacgtgactaagcaccgtttaaaatagcctttcttattctcttgtaaaattgcagggatttccatgacagatgtcgttttagtcattttaaaacttcagcgcgctgaacctcatcagcatatttttatttttgacatttcatattttagagtggattgaaaactaatttgatccatttcaatttggaacatccctcaaggtcattttaccagcatttaggccagtgttgatcttgctttcattttaaacatagttattttctctctgtgaagtgattactccttgcttggtgtgtggtctggtgacttgttaatttcaaaattctacgatgcaagcgggtttggacgtggagcctggcccggtgtggccaggctgtggctttgcccatcgcaacggctgcctttgcctcaaatggctcgaggctggcacctggtcaatatttgcttttgtccaaaagaaggaaacagtaggggacttgggtggtgtaattttagaactttactgttgggttgttggcttgaaagatccattctcttctataaatacagatacatatttactcctccaacctttccctccacacaattaagaaaccctacaattaattatgccaaatcaagatttgcttttctacatgattttttcccttttccctaggaagtctgtaatgaattttcttctttattgtaatattttatgtttttatatacacttgtatattcttatagcacatatatgtatatatgcaaactttctgaggcttctaaaaaagagaaataatattggttgattaacctcaatttcttttcaatatcaaatgtgtaacaataaccccaaaaggagaggtttcagaaattaaaacaagttgacatttgcccacttctgaattaaaatgcagcatttgacttttgtactgttttggctgtcaagccttagttttttcacactatcaggtattttcagatcaaaggtaaatatgatttagaattatatttcaaattagaactgtcatatgcccacacatacattttgctgatatacttacaaactggtaaacaatgctctttaatcaacaattcataatctgggtcagcgatttttatctccatatttgctcatactgtatgacatcaatattttatattggcttgcccataacttaatattttataaaagcctacctatgaaattcatatttcatatttgcttggctatgaaattaatttttgtgatgctgcagttcaccttgtagcatacaaattgagaaaattagcaagctgcatgtagttccttgctgtacaaaaacaaatgacacatggtgtctttatcacttgttttgtatttacagataaattttaaaaataaaacttgccatttctgttaacgtggaaaactccccaccccactcccattcttgttgactcttttttatttttaaacaacaaatacataatcaacttcagtcatctcattttcaggggagttactcattgtattttctacttacagtcaccggggctgatgttgggatctgtgatcagtttcctgttgttacgcatagcttttctcagcggtgagagagacatcatgtacagagtacacacggagggttgagatagcagcctggtttatcttacttctgatatgacttttaaaatattgattttaaaagtgtgtctttgagtgtaccaaaatagtatgtccctgatgcttctcgctggatgcaatccctgcgcaaatgctttctatgcaattagattttggggctcagcttccattttttaaatctgtgaaagcattgatcatgccagcggccctggagagggccactctgttttagtgccatttacatgtatcaggacaggacagaaaagggacagcatattacaaacaaaataaaactataatcttgttcaatccttgtcatgctgaggatgtttgtaaatataaaaaaaattgtatggattccacttacatgagataactggaggggttagattcatagagaaagaaattagagcagtggttactagtggctggaggcaagggggggaatgaggagttattgtttaatggggacagagtttctgtctgggaagatgaaaaagctctggagatggatggtggtgatagctacaccacagtgagtgtacttaataccactgaagagtacacttaaaaaatggttaaaatagtaaattttatgctatgcctattttagcacaataaaataatacacattcatggaaacagggcatttaaatcattatgcataataaagtgagaagctagttgtgatttgcaaagaattatagaaattatagggagaaacacaatctcaagagccaccctggagtccagagctctcgttttacagattcaggagtggaggctcaaagaatatatgctttcttaatgactggaacccagacggcaggacccccacacagggctccttgctgaccctttgctgccttcccccctcccttagaggggccattctttattctgagtaaacgtgccactgattagatgggcttcatgataaagacctgcagtaaggacgttttaatcctttaatctagacggttcacgagttccactggtgtgtctctgggggcaggctcccagatcacagactggttccaccgtgccccgtgacctcagcgtgccattagatgggaggccgttatttcaggggaaaaatcatgtttgaaactaagtgggtccccggcagtttgcagcaacactggctgctcaaaaggacagcacgaggcttttcacagcatgtagatgccatggctttatgagagctttgagcttgggagggtctacttgtgcttttgcaaccttagtttagatttcatttgcatctactatttgtaagtgcaccatttttctacgggaagtatgtatgtgagaattatctacatgatttttgtaggtggctcacaaaacaaatgtcagtagccattctatggccttggagtatcatttcccacaccttttctatggactgtctttatttttgactctaatacgtatcccttatcatacaaaaagttcttgagcatatttgatatattttaaaacttccaccccagtggaattaacactaattatatttaattccacacaaacttttgtcccagttgtagaccatttacctacttcctgacagcaaacactacaccgctgtgaaattttattttaacacatttgtgcccattttcagcattaataatcgtgtgtggaagtggcagcaaaatgaagatatcgcctgagcatggaaccacaaatgcctgaacgtgtgatggcatttgtgaaacaaaagcatgacatactttttctttccaaatgaggcagtgccacaactaaaaaagccagttcgcctttcgctttctaaaatcatcttgctggagagaacggttatcaaatcccatccactgcccatgtaaaataaataccattcagaaaagcgtggcatggatggccatacttctgatgggtttataactgtagattgcatacgatcccaacgtgaagcctgaaatacgacattcaacgtcaggcttattccaggctactgctgtggctacttttgtaattcaaccagtggggcgttttaggctaacgtatattgcctctaagctgataagcattttcctgatcccaggccccttctaaaattgaacacacacgttcagctggggacacctagatggaaggaagggaaagaggagaacccgaagtgaaggaaaagtcaccaagaacagtttcatggaaaaaaaaaaaaaaactctcaagaattaagaatgttgagttgcttgaatggagcttgggcaggaaaaagaccataactctcacacacgtgaaggttactgatacccaggaggtaaaagaagtatttaacatgctctaaagaagggtaaccagagtaatggggcgaaaccaagggaggacgtcctggaatgtaatattagaaataaacttccaaacagggaagtgtccatccgagtgtgaaatgggtttatcagaaacaagctgcatgccagtttcattgacattgcaaagaaggttagaataaaaagctaatgaacagaaagaagaaagaggcaaacagggtgtgtgttgagagtggtggaatatgaaggatggtgcatttgtccaggctggggctgctggcctgaggaatggtggtggagtttttttacagagcatcttctgagcaccaggagagtcccggaagctgagtttgacactagcaagacctgccctgaattggggactgctggatgcctggaagctcccctacacttacgttcctgaagttgggctttttatcaccttaggactatggcttcccaaacttggcagtcagcgtcccggcaaaagcctctctattactgcgaggtagtgtttatggagtcacagctaagaattacagaaaaaatcataataggtgaatcttttttttttaaaaaaaacaacattttttgactttgcaaataaattgcagaattatcaccattgttgaaatattttccattaaaactagagtttattaaaagtgcctggaaggatgccccctgctgcctccctgagtcatcgctttggatttgttcttcagaggcagagatttatttccatagcaggggttttcagttttgtgcttacagtcccgcagtaagtcttactggcttcatcttctgacctgcttttaaaacagtcctccaccgtgctaggtacacaaagggatactttttgggtttttttgagacagagtctcgctctgtcacccgggctggagtgcagtggtgtgatctcagctcactgcaacttctgcctcccaggttcaaacaattctagtgcctcagtctcccgagtagctaggactacaggtacgcatcaccacacctgaataattttttttttttgtatttttggtagaaacagggttttgccatgttggccagactggtctcaaactcctgacctcaggtgatctgcctgtctcggcctcccagagtgctgggattataggcgtgaaccactgtgctgggcccaaagtgaaactattataacaaggtaagagcaacttttcccagagttaaaggatggtgctccatggaatagtgaaagtctgggaccaaagcaccttttccctttaatttctccaattgcttttaaaatattctatgcaataagcatctgagtccaaagggaggctgtgtcttcctctagggtctctctgaatgaggtcagtttctatgttaacttttacgcttccttttttgtctcatcccaaaccatttctcctcttgtcatcctctttttcctcctccttttccttcttatttctcctgttgccttttttctacctttttattttttgccaatatacataaaattgcttgttaaaaaaagatcaaagacagcatttttatatttttttcttaaaaaacaatatgaagggctgggcacggtggctcatgcctgtaatcccagcactttgggaggccaaggtgggcggatcatgagctcaggggttcaagaccagcctggccaacgtagtgaaaccccgtctctactaaaaacaaaaaaattagctgggcatggtggcgcacacctgtagtcccagctactcgggaggctgaggcaggagaattgcttgaacctgggaggcagaggttgcagtgagctgagatcgctccactgcactccggtttgggcaacagagcgagactttgtctcaaaaaaaaaaaaaaagaagttaaaccatgaaaccacccataatatattagtcttcagaaagaaaagaaaaccaaggtaagatgcaaataacagaagtacaacttttatttttctaattgtggagtgactccaagaggattctgctcccaccaggtgggcgataggcgtcctgttggtggcgtgtaaaggaatggaaagctaccacgacctggggggtccaagaggggctgctgcaggtagcctacccccccagccttccccatgaccacagccacccactccctcaaagtgggacttcaggccaagcaggggaagatctcaggcgaggagaaacagtccatccgagagctccctgggagaatcttgtagactacacgctaatgagataggcctgtcgccaaaggtcacctccgcactgtcttggccacaaatgaggcctgaaatcctgctattagagttgcacacacacaggagcctcctctgggagttctgttaaccactggtctgggagaagagacggcacagatggcctccccagtctttccagggcagagcggtgggggcgggaaggaaaggaagtgccgagtagttcaggagagggggtgggcatggggttggggggcagcctggggacactatggccccatcctagcctggtgggagctagaggaacagggaaagtaagtctaaagtaagctagactcaggaaagggaaagaaaactctgcgtgtctttttttctttccttcttttcctgacacacatagtcttgtgctctctctgggctggttccactagtgcagcgatgctatgggggaggggcccagggccctgataacaggtgggcgtgtgtcaaatagcaactcaaccaatgaatgaatgaatctgcctctcctacctctccggacagttttgaagtttaggtgaaaccatgtgtacaaaagctcctgtgaactgggagacactttgcaatcccaaagtggttaataataaaaatagtaatacttttaaaaaatcataacaaataataataatgctattggaaccatcaatctaatacactttttttctgtgagagacttattggattctttccttggcatgaaagccctgcttctcccaacacaggcaggctccctctggcacagggtgattgcatcatagacctgacccaacgtgacagagaagcggttctttctgagttaccaatggccatccatctttcagcaggcgtgccttcccattttccttgctctgcccatgagaattttcagcagaaccttggattaggtgtgccagacatgttctactcttgattgtgaagattatacacactctcaccttctgagataaatgttattaaattggataaacaaccttgtgtagttttgcttttctgttttatctcaagatcctgctgacatggctaacagggcaactgtgaaaagatttttattcgtgtctacatcagtgtgaaaggcttcatcctggtgtgtactaatcactcagacagtggtatgaataaatgaaggaatgcattgacaaactaatacacaaggtgattccggaaaggcgcacctcctgggataaatacggtgacagtggtgagtctgctctaggtctacgaagttcttgctcttagtagagatccagacacccaatgttgaagacagttcctctttgctttagaaagctttgtgtgcaagagatggcaaactacttcttaaaaaacagagagtcccgtaaacatatgccaaggtccacggtgctccaggcagggtgcttggtgccagagagacagagtgaactgagctggccatggcatctgtcctggagaagtcacactccaatcaggaaggcaggaatgtgggccagacctacagcctctggggaagggtgtccataagctgtgaggtggtggctactgactccaatggcagagaaggtgtggtaaaaaggcaaggacatctgcaatccttctctaactcttgacttattgttatctgcagcaggttaaccacccctctgttaacttccttctctctaatgaggatattaagagtagttgcctcagaaggttgagcaaatttggtaatttacacaatgtgtagttgtcccttggtatccatggggaattgattctaggatctcctatggatatcaaactccaaggatgctcaagtctctgatacaaactggcataatatttgcctgtaacctacacagatcctcttgtgtactttaaataatctctagattacttataatatctaatgcaacataaatactatgtaaacacttgttatgatatttttattggcattatttttattgttttattatttttaaatatttcaatccatagtgggttgaatccagtaatgtggaacccacagatatagaggccaagatacctcaatgattggcagttccagcattgcccatctccctgtaccaatctgtgccaacctcggaactgtggttgagtcccaagctagggggtcggttcacaccatccatcccaccactgcagcagatgctcacccagcgtcaactctgaaccaaacaccattctgggcaggggcgaaggtgagaagcacagaccttggccctgctctcccctcctcaggagcccagcagagccagtccccacaggtgggactccactacccaagggaagcctgaggcatgaggcctgtgtgttgctcagtgaccgggtccatcctcccagtgccagagaaaaggaggtgcccctcaaaccacaaagtaacccttggacttctctttagctggggtggtggctgctggagagggccctgcttgctcatctctgccagcttcccagtccctgcaaccagcagtggccagcctctggccacccccatgaaagcacataaaagggttggggaagccgcaaccccagaattgaggtgagctagagtttgaggacataggttgcttttcacttatctccagcaagaaccatgttatagatcattggtacagtgacgattttatgcttctaattgaatactgatgaaaaatggcaatggtttctcagttacttcttggaaataaattgtgggtaaataacatctgcttaaagcttggaaacccagtttcctttggtttgtgtttttaaatgctttgacgatgcggtttgcttttttactccaagaaaaaaaaaacaattaaatagaggctgacaactaggtgagatccacagccaagctattctaagagcccgaagtcaccctggacacccagcttgatgacaaagggcagaaattcaatatggaaataggatccactccaaatgcaccatctccgacattatgatgaagagaatatgtatttcatgacagggcaaatgttgccatccttctgagggaagatgtaaatgaggatgcttttagggatgatttctacattgtcactaaactgagacatttgtgcttgctcgtgccaagtgaagattgctgttgctgttgttctctcgcagtgattagggttcattccctagcaacaggcagcagcagaaaggaagctttgcaggcagagtcaccgaataaacgcagtgggaacagtatcaacaacaaacccagtgatgaagggaggggcatgtggggcacaccacattgcctctctggcttctcgtctgcacctggggccagaggcaggtgggaaggagaccttgacaatgtgggaagtccctttgatttgctgaaatggaggagttcacattttactgtgcagtctaacattgcccattctggattagctccatcagacacgcttttgtgctttactgtaactctttctttatttgtcctcctcgaaactgatccataatgccaatttgctgatcagctgtccctgggacttcggtgtactgggctagaacctcagtctagtgttcaaaggagctggcagaatgggttgtctcggcatggaggacccaaaagcagagctccctggtgctttgggggagagtgaagcccttcattccactcctcattgcagaccagctttcctggtattcatgcactgctttttgtaacgcctcaaatgaaggccacagctcagccaagtagaagagagctcctaataaatgaagtctggttgcctttgaatttataaaataatcaaagttgctatttcctgctaaggagacagatacagaacaggtgataggccacagtcattactgtcccctgcttgttccctgagcccctggccttctaccttttctaactgctgtcagaaccctggttggggacttccttttgcctggttctcctgggcttgaatggcaacctatattgacagatttcatgccacagttctttttcaaacaagatgattcacaatggaataattgggtttgggaagaaggcctttttaaagcaaactatggaaaataattgatgagtagcgcagttttataaaacttttttttctattaccctttaaaaactatgttgctaactgcacatcacactgcattcatatcctgggactaataccccttgacctctgccatatgaattaaggtgaaagaagggtcataagtaacaaagtttcaaagttgaatgaaccttttttttcctgtaattttactgaccatttccctttctgtttgagagatctgtgcggtcctgttgctgaggttctgtggttcaggggtgttatcggcgacagagtgctgatttcacttgggtctgttctggtttgtcttaatttctcttttagagcttaattttcatttccaacgaattaggcaagacagaaagtgacatttggaaaagagtgaatggatgactaaacattcaccagacgtcattcttgtaacagttaaatggtagtgattcatgtctccatctcttgataaaatataaagcattaaatcttgatggctaaacacactgacaaaactaccgaaccatgttcctggttgaggatacctgaaggtcgacatttatctgggatcttttgctgctgctttggtatgacttctatcaagatagctttcgacgaggtagaacgtttgctttcactctgggttttccttggtttcgacaatttttaagtgttaactgaaggaaatcccgtcttgtcagaatgttcttttcaatacaaatcgcagtgaaataacgggctagaaagatgtggatccttcttgattttaggaagcacacacctatcggcaactctctctgcctggcctgtgttcacggcggtatttttgcctctgtcaccatccttgggactaggtacaaaaataggcttatgttccacgtgtcacccaccacttcacttcctttttaatagatcatgggtaaggaggtgagaggacatgagaaggattggtatgaagtaaataacagttaaatcttttcagccaggggtggtggctcaagcctgtaatcccagcactttgggaggccgaggcgggcggatcacctgaggtcaggagtgcgagaccaccctagccaacgtggtgagaccccgtctctactaaaaaatacaaaaattagccgggcgtggtggtggatgcctgtaatcccagctactcaggaggctgagacaggagaattgcttgaacctgggaggcagaggttgcggtgagccgagatcgcgctattgcactccagcctgggcgacagagtgagactccgtctcaaaaaaaaaaaaaaaaagagttaaatcttttcagatttctaggctggaaatcaacagaacaagatctgctagcagaagttgttacatctcaactaagtatagactggagatgaatctgacaacctgtgacatctttaaatgtcaaacccaccgcacatcacagatgacatcgtacctaatgatcaaactccctttaaaatatacttcatgtaaatacatttttgcgaaaccacaagctgtttctctcagttttgttttcagctggctttgataaggagattggttggcagcctacagctaattaagcagctttcaagccaacatcaatgaaaggttttaggtgactatcagaaatccattccactctccatggtccaccggtgtcgactatgcctttcaattgtgccgacagaccctgtcagaagagaatggtttcgcactaatccaagtttacaaccaaaatcatcctgttttcagtggtgtagatccagtgtctgtatctgtcttgtcaactcacaatagcattagcacagggggctggatttatgctctaagaaatgcaatttacctttctaagctcacttatatatatttgtatctaacatattgtaaatttcttaaacttgttacacatttaattttataactagaaatcaatttttatttatttatttatttatttagtggaaaacagaaaatgaagtgcaagagaccctcatttccggggcaagaattctgagttccttggcttctttcattcttgtctgactttcccccctccagttgcagttatttctagattttggtaaattattcattgcttttaaaagagaaaaagctcgattttctaaatctacagttgagctagccctaacctctaaagccagattgctttaacaaaattgtcatcattttatacatgacagattggcttcaaataaaatggtaaatgggaggaaaagtatattttgcttacacttaggaatgcctgtaaacgtaacagagtttaaaaaaaaatcttggtgttttaacaaatgcatattgtgaaaaagaggaagaaaaaattagctggttgcctgtgaagtaattgtgctaaaaacattcatttttaatatataagagttcacattttaattcatatacttgcaaaagaaaagtgggattttttttcttaaggctttgactatttaaggaaagcttttgtgctgtgccagtctgcttttaagaaattccagagttacagatacaattgagggtgaacttgaatttgttccgtgggcacggccttttctgttgtggtaaaacaaagttaaaatgacaacggttctgaagaaagtgcttcaagaccatgtcctgtttcactctttccagatgactaaaatcaccctcatttcccaagtcttacatcgggggaagaggatatgtggtttaaaagagtggcaagtactagttaaggtcaggctttttctgaatgtgaacattcagttatgctgcatgaagataggggcaggtattgcagagtaaaattctcatacagaaaatgtctgaaagtaacaaattaggtgattaccacggtctccttatccactgtcatctttaatcgtcgtgtttttttttcaaggctgttttgtctgtttttaaatgctgttgtcttatataaatcaggctacttgctttaaagtaccagaagaatcctataatactgaaaaaattgaaatataaaaaagtgaagtaagaattctgagtcacatgttttagatacggtgttaaacaacataacacattatcttgaatggaagatgttattaccttggtgctctcatcagttcagcttgcccagaagcaatgccaacctttcactgagaatcttttaaactgaccacaaatgtccctattcttctcaatgatttaaaatgtcctgtgctaacttttctatcagtcaatatgtatttttcagtgttcttactgagttttgttatttgcttttagttcttttcactgtttatttgctggtttatgttttatgaagaaatccactttcagaagaaatgatgacttattttctgtgggtgtttcctttcttcactactttaagaattttcaagtataaataaattgtgagaatacatatgtgtgcaaggagtgtggggaagagttaactaatttttaaattgaaatgagggaaatactgggctgactctactggtgtttttcagagtgttcctcaatttaacaaagcaaagcactgagtagtatttctttctaatatagatgtttaaaaacatcttccaaagtaagtagcaagaactaatgctcaaagtgttgtctgaaaaatctagaaatatctgcatgctgttatgaacaattctgtttctttatggagagttgtttgggctttttagaaactcattaatttgattgtaagcacctcactgttatcaggaaaagaagctttagaaaatggtttcagaatgtgtcattttctccttgttttaatctgagacagtgtgtgggcatgctggtattttaaaaggctaaaaatgttgtacatattgctgtgtcttcaaatatgagggaagattacaaacagaagttttcttcaagcctctgtctgaaattctgcttttcttctcagtagtgattcttaaatttttacggagagatctttcattcttttttttttcattttcaatctgttgttgaaattcagcaaaacaaatattttaaaagccaagtcagctttctaccgttttgatctgaatatttaatgctttataaaataaaaccctgtgttttaattttaactagtttcattctttttttatgaaatgatttgcggtattagactgtcatttggtttcaatattaatatataacatgaactacgtgggtgtcacttattttcagtagtaaataactgcttaaccgattactttactttaacatagttctactgttctccttgagcctcgtgatctgcatcttcaaacaatatttggtgtgtgtttttgcaaaatagcatttacatactgtgtcattaaaaactagtttcatggtgtcatggtggtcggaatcagggaatgtcgtgtagttggtttcaaaatccatcagtaggttaatcattaattattctttttccaggaaaaaactgatgaggttgtttcagaatttgaatttactagaattccttttttttttttgcattaaaaaaaaacttttgcattttaagcttaaagggggttaatttggtaagaaaaggtaccttttctgtttgtattgtggcttgttcattttctcataaactgtatttggtagctaaaatgttgaaagcagtttgggaacaaaatgtctgctcaaaccatgacaaaattggccacaatttgccgattgggctgataacaaaagccagcaacacaaaataggtagaaaaacagtttgttcggtgatgtgagaccactgaagctcttttttgcatgttttttttttttttttttcattctgatgcttatgttgtgatggaaatacatgaagtctctgcttacccattgtttctgattaactatttcatctttggatttcttttaaaacttcagaaaacaagctgccccctgggcatctgagacaaatttgaaataagagccagctctgcacctaaacattgtgttttctctagaccccacttggttgtaaatgtcccaaaactcttgttttgatcgtttaaagcagcatttaaattccatttcccccaccaccccaatgttcaacattgaattgtatggcttttactacacttttgcaagtgtaaaacaaaaattctagtttgcagtttaaaagaaaagttctccacctgggtatatagttgacaaaaatgtcaacagctaaaagtacatattgactctcatattatcttcgcagactgtaagcaactattaatgttttacatgagacaatacatttttttcaaatgatagaacgagataacagcctcctctcccttgcctctgctgttgtaacttctcataccttgtgttgcctctgtgtgtgtgatggtcttatttttttggtcttaaaaatcagatcctccaggacaataattaggatgaggtttatgtttctacttatctaatctttgttttcacaaataaatacaaataactcaaactgaaacttgatggctttggtgataatataatagcagccacggggaaattttcttcattttaatgttctttcacaacccacattcagtttcggtaggaaaattattaaccttttcaaaagcatgctgaaatatgggttcacaatagactcctgagtatgatttgcaggttttggttctattttgagattttggtgtacagtttttctctttttttctctctttctttcgttcgttcattctctcataccaattgctttctttgacaccaatcgcaatgacttaaaatccttcagttgatatctttttaatgtgtgcacgttatacagtgtttgcatttatttttttattatgagaagggagaattcctatttccttctctcctactgattggttctatgaaagaggacatactctttattctcactgtttttctccactctaatcctcatgtggaggttgtgagtcctccagccccatttaaaaaaatccagttgagccacatttccccgagggcacctggctccatgtcaggcatcagatctgactcctgtctgcctccagtggcctcgtgtctgtgtccatcacaccaaagcaagtccgcccgtttgggcttgctgtcctgaaggtctgcacggcctcaggcttccaaggaaggcctgggtggcggtgtctccatagctgactgctgctggggctgcaggtctggaagggctattggagggaggtgatcatgattttgtaactctggcttcttcacctgaaacacacacgagggcaggacctggggccagagaggcaggtgagtaggaggatctcggataacagtttctgttttaggcatccccttctccaagtctggctgggacagccacacctgcagagagggccctgattggggtcgtggtcctgccccacatctggcaagcctgtgcctcatgtactcacagtcaccttttttatttgatccccatccatcctaagtccccaccccaccgcagtgccctaccctacctgttcccaccgtccctgcaaagttgaatatggaaactgagaaacacatattttatctgtaacaaatgtggacatttccagtattttagcctgggtttttttcttcttcttcttctgcttctcatacttcctgtatgaggttagtttttttaaaatgataaacaaactattttttttttcaacttttttgggaggcctggttgtctagtgcctcctacctgtgttgttgtgagccttttgctggtgctctctacctgggcacagaggtcggtgtgagcagagcctgaaagtgggagtgggggatgtggtgttttgcatagggttgcagtgaggagggttgagctggtgaaaacacttctgttctcctatttgagagagatgcagcagaattcatggctgtcgtgttctgtgcaggcaaaatgagctgaaggatggaaggcaagggggataggagcaggggtggagcatggctagaagagacatttgatgtttagggagagaacactggtgcagattgaatatcccacagtgctcagtcccacgctgtgcagatgagcaacatctggaaaagaagattaagggatgaagcatgccaacatttctccccaggtcaccccaaaaatgagttgaaaattctggatggcttctgagctgcttgctctttccgcccccagtcgggatctcaggagagagcgtccggcaagtagcttgggtacagttgactaagtgtgaacatcagtagccagccgcatagccaacctgcagtcacccatggccctgcatacaagagtgtcactaggagcagatatcacttgccactggtggttgtgtgtatctgaatcacctgggcactgtgaaacacacattcctaggccccagccccagggtttccttcttagaatatgtgaggtgaggccggagaatttgcatttctaacaactctcaggtaatgagatgctgccagtgctgagactcccattgagaactgcagcctagagccagggtgctggaaatgcctaaaaaccgtgtctactggagtctgcaagttgtctccacttttttcctaatgtccctttgtgtgtcctaccacagacttaaaatccacaccagcctctcagaaggccttttgcatttctcagtaactgcacagcaaggttacctgtcatcttggccttttaccatgtccatcagactataaaatggctaaaatgtttttgaggtttggttctctgaaaaatgggttgtattttacagatagtgaaagggtcaagctgtagtgtatggtatcactagactaggaaacaatctaccaagggccaacccttgggttgctgccccttgacaatttccgcctttattataaactaagggagctgtcataggttcttccctatatagagcactcttgacgtaagtgacaccatcttagaaaaagactccatcttacatgtcaaaaggcatcatgccaacagggaacagatggccacctaatcaataaagaccacacccaaccagacagggacatcaccagccctcttctactatcagtccttgccagaggtctcagggctataagaagagcaggatttcaccggcttgagatggtcgtcttaacagagccttgctctgttgttgctcgtgatcagcacctggcatctgctgccaaagactctgcccacatcagagactcttgatgtctgtccggaacaggccaggacactctcatccacgttgctctcattggattggctcattaaccctttcttctatccccttctcactctttttttttcaaagccacacttatgctctgttatcccctttctctcgatgttaaatgttactgttccatgtggaatgtttaatatagcatttatatattgattaagttaaggacactgctgtgtatggtttgcaatattgactgacttgcagagtggcttgagcctgagtgctcacagctctgactaccagttgaacaggacgtactaaggagaatcacttccttgggaactccatgtaacttgtggcttttgtgattgaaatagcatcagtaaaagtctgaccctgtggaaagacacaaatgtgcgtggacctggctatgtctgactttgtgctgctcaggacactctctgtaaccaaaagtgagagagcctggaagacctcagggggtcagatgtttgaaggagctgctgagtatcctggcaggcagcagagcctcaccatcagtttgctgcatggaaggctgtgtgcctctatttccctgctatttgttgaactcccttgagctccggtccttcctaagtgagagagatgataccaatagcaccaacctgagagggctggggagatgtttgaaggaaagcttggctggggagctgtagctggcctgtggtacatgcttggtaactggtggccaggagacccgggtgtgtgtcctgggactgtcacactctgctgacgagggtattgaaagtccccactcaaagacacagaatcttcctgaccaagtgtaggtctgtaatgacgtgtggagcactttgcagaaactgcttctcagcgggggtccccttgaaaaggtgctaagtctgctcagagatacgtggctgaagctctagacgcgggagcctctgtcagagacaagggcagggggactcaagtgctgctgcctggctcccctgccctgacagctctagcagcacacgagtctgatttatacaaagaacccatctcatatctccctaaaattagtctgtgataagcaatatacatttcctgagtgtgcggtctaggttttaatattctgaaaaataaaaacagtggtctcttgagagctgaacagtttggtagttactgagcaggctccatcctccttggcaattcttttgaaatctcaaaaagttggcttcctatactgttagaatctgatgtgagtcaagaatggacaggctgtgagttcctcactcgtcccttttctatgcattgaggaagacctcggtgctgccaatggggcagaggaagctcaagtgtgtttttgcatgaggctggctggaagctctggcttgggctctcagcagtgaggtactggcagttccttggatgtcacagcaaatcgaagctcgtggtcttcacttcctcctaccttgagacttactgcgcagaaagtagaggcttggatggttcaacttcaggggcaaaacagcctgccttgggggtgggactgggggtatgcatctgtgccactgcttctctccctttgtcagtttaccatgccagcagccttctgtctgttatcgggaacagaaagagcacgatttgggagctagctggggagcttcccgaaggttgcctgagctgcatttggggcccctgatgagggcttctattcagggtgatgtgtgtgaccctgaggccatctctcagatctggggggaagtgaggttgtgtacccacagtggggagacctacctggcggctcatcaatattagacacctgcaggaacagcaggtcagccaagccaaagagtaagagtggccctgtctgtgactagacgcttcttcagggttgcctcaacaccggagtggcgctggtggtctccacccactcccagtgtacgctggcgtctaggaagccatgtgtgtgatcggccctgaattaggggcaaaacttttagttctcagatgaactgtcgtgggtttattcagtgataactagacagccaggccaacatggagttgattcatccatgcaaaacctcccagacaaggcctttcagtggagaactggaattcagggtcttctcagctttggccagaagccaaaggtaggagaggtaggagagacccaggtcctggtcccagctgtgtcccatccagagtgaccttgggaaggttgccaacttcctttttcggtgagccttgctttcttcacctgcaaggtgaagggttggttggatgatccgtaagggccggccacctctcactctgtgactttggcccaaggtccacatggttgggtgttccatactgtagccctcctgggctattacattttggtttttcattgcactcaaaagtgggggtaactggtgaggggcacgggttggtaaaccacctctctatttcagtgatgaaactaaagaaaccaggtttccccttccacccctacaggccactgatgcattacttagttcctgtttctctttgcccacccaggaagacactgcgtatgaaatcctgggcccagatgctggactttaagccacattagaaaatgctagctcataggactcaaaacgggaagctggctttcccaacagattcatctgggcagtgttcttcccagaatgtgtaggaatcatggggccaggttcgccaaggctcaggaagctcgatttttcactgtcactagccaatgaggcctttaaggaaaaaacagataagactgtaggagtttatatggatccgttaactcacttgtacaagacattgggaaagatactgggggtgggggggaaacaatacagagtttcaaaagataaatagagactgtcataatcaccacatgtcctggcagccagggctacggggtcaggagaagctttattccctggcctgcagcactgcaagagaccctaggaggaggagagctccgccaggccctgcaggctgggcagcctgcctttggccacatttcctaacaccactcagcagagccctgccagcaaaggtcattgtgcaaaaaatgttatgccccatatatgtttgggaagtgcacaataatttaaacagctttcttatttcttaacttctctgggtattttgtgtgctactgtatcttgtgaatgaatctcaagaggaaggatgaagcttttccaaaatcacatgccttcatctcattttacagaaaaatttgtgcctaatattaaccaaaggaaatggggagcggcagggccagtgggttttcatggtgaactgagggttgcatcttggacaggttgcatgtggaagggacagcagggttcccaaggaagctttgcacggtcatgggtagagccatcccttcttcatccatagtgaatatggctggaaatagcgggtagtcttggatttgacctccctcccatggaagtgctgtctccagctcgctcctggaaaaactgctttctccccaaagtgtgtctgagcagcagatttaagcatgaagttggttttgtggggctacagtatggactttgggaagatggtgccatctgtatttctgattctaccgtccctctgtctgtctttggaagtatcctttcacttgtttgggagactgagaatgattttctgcaaacagtgagccagaccatgctggtctcaagcggcagagcagttattaacagaatcacagtctttctggagctgctgtcagtcctgtgctgtcctcagggcctttgcttggtcaggggccccacttcttatccacccttccctctacctcaccgaggctgctaggcccaggtgtattgtgattatttgatgtacctgggaggccatgtctcccggggaggctcaggacctcattgggctggaattccacagggatctctcattgggtctctttgggcctttggagaggggagtgcagggcaccacctgggcgaacacctgtgccatcctgtaagtccttgtgtgactcttcatccaagtcaacaggggcatgtaggggaagagcctcagggcccatcaggagtcagaccctgaccaggaagtcagaactgaatcaacttttcaataaacacacaggctggccccaaacaaagcagcaggcttttgggaacatctgccttttcagtctcttctgaattctgtttatgtggacaccccatgtcccgcaccaccattgccgccagcaatgtttgttgcttgccaatatttgaatagatgctgataaatttgattctctggcttattgtggcattcatgatatgtctttcccttttcagtttccatgtactagagcgactgtcagtgtggttggcagtgacctgtgtttttcatgcatgtttttgtttcagaataactgggagatgaaacaggaagctctatgacacacttgatcgaatatgacagacaccgaaaatcacgactcagccccctccagcacctctacctgttgcccgccgatcacagccggaatgcagctgaaagattccctggggcctggttccaaccgcccactgtggactctgaggcctctgcatttgcgggtggtctgcctgtgatattttggtcatgggctggtctggtcggtttcccatttgtctggccagtctctatgtgtcttaatcccttgtccttcattaaaagcaaaactaaagaaaacagaa

SEQ ID NO: 17 - DNA, 181960 bp, Homo sapiens
gcagataaacattctccaacaattattaagagttggattgctctaccttcatttaattccttggtgctttactatttgaatctagaatattcttgaagtctgaaagatggatagaaaagaggtaagtcatgtaaacttataaacagggcacgaaccccgctaacagacagctttgaagagatgatgattttagatcttgtgaattgttatgtcagaggaatacatgcagaagaaaacaggcaccgaaatagttattaccagagcaaagtaaatctgaacacctaaaagaataagaaaatatcttatgcttctctctactctgaactgccttgaaaagagcaagaatttcatacatgagcctgtagcacattacaaaatctgagtatgtatttgaaattcaaatgcacacaaagttcatgcattttattttccagttgttctcaagactcctaaataaagcatttcccctgtgtgggcgacccctgggtcccatgtggggtcagtgtttgggtctctctgagaggatcaggaaggctgctcttccaggaagggctgcagggaccctgggaaccggaccagtccagctcacaagtatgaagagaatgtcgggagaggaagtggtggctatgagtcagcatgagtcatctcgttccaatgagaatgaaggctgaggtgtgcgcctttttttttttttccttcttagtcgtgtgtacatcattgggaatggagggaaataaatgactggatggtcgctgctttttaagtttcaaattgacattccagacaagcggtgcctgagcccgtgcctgtcttcagatcttcacagcacagttcctgggaaggtggagccaccagcctctccttggtgagtatgtttctgtcatttttagggttgcttctgcagtttgccttggagtctgggctgtgggaaaggctgctgcgtcctggtgaggacactgcgtttctttcagactttgaagatctgtcgttttagaaaagtggctgcctctgtcaccagccccatggttactgtcctttagtgtgactgtcaggaggtgtttctcagtccttcgttgtaagaatgtagatgccggttgcaccttctgttgtcttggaagagactgcagtgcttggctggaaaataagctgctcgggactcctctgagaagccaaagtgaagctcagagatggaagtgggtatacttgtgctaacccagggttgctgaggttgggtgagcttccgcttctccgaggtggaggagaggcagctcctgagccatttctggcctcgtggtcagagctgcccaatttcagtgtgagaaataccagagaggcagaactttggctgccttctctaaaagcatatgaatgattgcaggagcgtattttacgtcctttccttttccttaacgttgaaagtcacaaactgtagtaaaatcaggaagaacgtaaaaatgctgggggccagcgctgggggtgggggactggggaggactgaggagggggccactcagtctttgaggcctgacttgatcttgataggtatttctcaggctgttagtattccgatgaagcttagctttactgtcaagtaaaatacaggaaacatttttttttaatgttgttctagttactgtaaatgaaacggttaaaatgtcataaataccttatgataaacatttttcaaatttgcttaaaaagcaacacatcagtaggcagggtatgacagggagctttttcagtacagtcatttgagtgtgtgggcttcctgagttaataatgagtcagcacccaattctaaaattggagcagctaagagaatgttcaatctgctcctcagcacagcacggtggctggccggccccccgtaggaaggcttggggttaaaatcgacttaggatgccgcccttatgtaagtgaccagctcccagcttgggtcccagctcctctgggctactgctgagagaccccctctgctaagggatctgtctctgaggcaggagctaacacatttggcttccaacctttggctaatgttgacgatttttaggttgtcttgaggcaacaggttgaacatagtttctgaaatgaaaaatctagtgtttattaaggctagggcagctgagggctgagcctgcatctggagccttgagatgttccgcttgcacgtcaccctcgccgagggattgggcgggagagtcggtcaccgagtgaacttcaaagttggcgctctgcatgtgacgtgtagcgtgggaagattaagtcagcttaaaatgagagaacaagattccaaggaagaaaacctccccagaaccttactcgtttatagataaaagaagataaatattgagaaaattaaaaaaataaaacgaaatagttgggctgcaaaccagcagctctgggaccagatgcagccctggtgaaggcatcccccaccaggttctgtttggcctgctcaggattgtttttttgtgttgagataactgtgggtggggtccacactctccggatctcaggccctgccacaccctaatgccacaaagcttggagagtgcgattacagcgaggctcagaagccaggctgagggcctgccagcctcgtggggctgctgtgtggtccccatgggttagcatctgcccggccgccggaacagggcctggatggagaaggaactccatcagcactaactctgctagactctcttattaatctgccctctgaaggcatttgggcttgtggcccttgagttagttccatggctttttcaagaaagatcctgcagttccaatgtgagcagcagttgtttccaaggctaacaatttcacgccaactagaagcctccacaagtcaggtgccaggcatttctaagccagtagagcagctccgcttgtttctctgggtgagtcctctcagggtgagaccctgtctccttgtaagcactcggagacgtgccaccttcatggagacgggagccaatcaaaggcaaactgcgttagacagctcttccatgcggtatggacaccaacattcgatcatccttgtttcagagaaggtgccgggccccagacatgtgcttatcactgggtcccatggccttcaatcctttaaagggttttaaggtggctgatttttatcccagacattgatcatgttttttttcatgcagaatttgggcagttgtctggacattaggagttgagtcacctcctacccatgaggaacaagcctgtggggggactgatattatcacttctgtcatcaagaaataaggccgcaggcatccctgaatatagagcatttattaatcgaactgtgaaaatgaaacacagacagtgatgacagctggaagttggccaatgtcctgttgtcatattgccctcagcctagggactggcctgtggctcactgaccctgtctcccactctccacctctcatcagcaactggacctggtgcacctggtctacctcatgtccagtgttttccgcagtacctgactggtatccccacccttggttgttgtgtggtgagctcgtccctatgttggcaagttacttaattcctaggtgtcccgccttcctcactgtaaaatgagaaaagtcatagcacgaatgtcatgagtccttgtgaagattttatgattagcacacaagttacaaggagacacgataactgttacgtacgtactcattcgttcggaaatataacagacagcttagtatctccacccgggtccctctgccctgtgggaatccataaagaattgattctcatcccccagaagtgagatcccgcttgtgtcatcaattacatggcatgttctgcatttacaggacatttatttattaggtaagtggggaatcctccttggttctctccaggaaaacctggagttctagttatcatcatcatcatcatcatcatcactgtcatcatcattgacatcatcacaataagaactcccattgtattcagccctaaccgtatggtagcaactttatggtattccctttaacctccccccaccccaatatccatcctggaagatgggaaggatgataggtttgttgactcactcaaggcggtgggactctccagcaggtatcaggcacagcatctgcttcaaagaacacatcggcgacaggggagccccttgcactcactcaggacaggagaatcaggaaaagcagcagatctgcagggctttgtgtgtaatccaaccagactgatgccacaggccaggaaaccgaggacggttggcttcagacctaccctggagtggaagcagctggattctgtcctcacgcttcctgtctaaagccagctagagtaaatttctagtcatctagattctggttatttggaaatcatcacagtatctggagatgactcatattgaaaaaaattaaataagatacacttaaaacttaacccagggtgaacataacatggcctttccttgtcaattctgaagaagatcattcaagtttgtgcagtgccttagaagccagatgctctcttccattctgccagggtcctaaagaagtactactgtgtcctttagatcactctgccttgatcactctgtcccgtcactctgctatttcacctgtcagtgaaatacctggtatcgtcctgccaacatgaagcattgaatgctttatacgtctccatcctgattgtttaggctttgaatgctgagaagtatctgcactttgttggtcaattgtagatggtgctaatttgtggggagtttttcctgcaaattccccctgtgccataatccagaggacctccctctgcccccagtgctgtaggctaggcagctatgggcctggctcagggctgtcgggcaaggattggactctctataggttccgtttggttctggttagatcacagagctcaggcaaggaaaagccgacaatagatcagaaggaagttgagcgctcaggaaggaggagtgggcaggatgcttggtggtgtcagaggattccttcggattaaaaaaaatagatgttattgcactttgtgtaatcagaaaagctaaggttgacagcagatcttatccactgtggttttcctgcttatcttttgttttaggagtgataaccctgcgagtgagggcttctgctacagggtcttgtagctcttctcttcatcctgccctttaaaacatttattggactaaaaatcacaggatttttaatgatgacagaaaatgtattattttagctgttctcactggacaaatcacttacggagtgttgattaatacattgataagtttctatcaattcagctagatacaagggaaaatgtataaaatagcaagggctccgaaaagagtcaggcttaatttctcttgcacagaaaaaggattctattgctctttctgttccgtcctcaaacaggaagcaggttttctgggacaagggtcaacaggcagccagttcatccatctgcctactcagccatccttagcactggcttccttcctccaagttatcttatgcttcaagaaggctgctggagctcctgccatcacttctgcattccagacagaagagaggaaggaagtggagggcaaaaggcaaagcctcctagatgtcagactcctctgcaggcctttccttgaattcccagctaaccctttcagcctagtctttcactggccaccctatctgtaaaggagctggaggaggaagatggaggagtgaggcaaggccctgagatgatgcagagcaaggggcacacaagaggggactcaggtccaaggtgaaatagcagcaagcactctccctccaaaacccaccgcctccttatgaatccctttggccttgattatgccagtagataataggtatgtgacagttttagcttctctggcctttgatcaggttgatttatgtgaatagactccatgtccttggagatgaacctgttctaaaaattctaagcaaccagccatttggctctttgctggaaagtagcctggcttttgaagccaagtctggacagtttccttgctgcacctcaggactcaaaggacatggtcctgactcaggaagagctggctttgagggaaggggtgagtcatgaacccaagcacagcagagattcttggtgtgtgctgcagaaggtgagagtagcccccatctccctgtgccagtcttctgggggaaatttatgatggccttacataattgggcttatatgtgtttcactagaaagacaaaaaaaggtgagaccttgtctgccaattcgctaccacctccttggggtctaagagctaggctgtttgttcaaagctaggctcctttgtgtattaacagtgtgaccccgggcatcatccttaacccctctttgtcccaattccacatctgaatgatggggatgataatggtagactctgccacatatggttctgaggactaagtgaggccacatgtgcaaaggatccggaacagtgcctggccccaagtcagccctcaggcaacagaacagtgtttggattgtccttgttgctttattggatacgtgataagtactggtgaaatgcatgaatgaaaagaaatcccacttgattttaatacaagaatcaagcaagtgacttctgtccctttgaataccctcctccaagtggtccaaagtccttgaagctaccatctccttggtacccttcctgatgcttctggtgtgggcaatgtggttacttcatcaagtagaccctggttacagagaagttaaatgatttgtccccaggcccactcacaggagagagtactatacaatatcaagctggttgtcttcagcactctgttgtagagacttccagtatgcattctcttctgcttcctctgttgtcaaccacaagtccatgttgttagggacaacagtgtgcccagttaaaaaacgatatttcctagtctcctttacagatacggtggccaatgaaagatataggctgaaaggttagctagggattctagaaaagctctctaaaggagactgacatgtaataggcttagcattttgcacctgaattctctccttccccctgtctggaatgcagacgtgatggctggagctccagcagcctccatgaagccataagacaatgtggaggaaagaaaccagtgctaaggatggcagagcaggcagatggtcacaggtctttgggtgaccagctattttgcctgcctggagatttgactatttttggagccggatgcagagggaggtgggaaaaatattccagctgaaattcaacctgtaggagtatttttcagggtgtcagggtcacttctttgtggagctgcctttcaggtctctggtatagggggcaagggtcatggcctcatggtgatgcccagggaccccaggtgctttggtctttgcagaccactttcttatgaaaaagcagagtgtgactgctctggcagaaagataaatgtcattcaggctgattcattattatacattcattatcatttatttgtggttttcctctgattttaaaataaatcaaaattaaaacacttttgcaggcccctaacagtatcatgggccccatgcactgtgcccagcatgcccaatggacatgtaggccccaagagggcagagagcaatcacagaaggacttgccctggccaacataggctggtctctctaggggcagcttcggaattgtgaattacccagagctgcgtgccaggaaatgtggacctaactcttgcctctgaggaaggcaggcaggcttggtttcatgtactgttgatgagcccgacatcctcaatgctcactcgagctttggaaatgacaagcaggattttcagaacaggattctctgtcctgtccctgttttaatttcagcctccttattccccatgtaataattccccatactggctcaattatttgtttaacgggtatgaattccagtctataatgccaaggtatcaaaatgtgacgtacctttactctagaaatctctaaattatattaaatctgctccaagatcgccctgccctacctcaccctctctgcctggttattgggagattcaaattctgtcattattggggatcctttcttgtcataatgctccagatgtcatcaaacaaacttgggcttaggtgatgccaggaaacctgggggggagcatccattgtctgcggtggctgctaccattgcaacttcgacacctgcagtctcagtgtgtggggggctctgggagctgctcagggcctgctccagttggggtggaccccacacctctcgtgatctgtcctctaactgtaggctccgctgctggaaatgtgtcgctgctctcatggccactgtgtgagctcccagtctcagcaaatgcacccagcaatgtctgattgatagggcaccctctgtgggctttgtcctgcttgctgctagctgctgctgggcctctcccagcctgggcctcctgtctcagtctgaaggccaagagacagcagcgacagcagaggaggcagaaacagaaaactctccgaggacccggggaagtcacaaggtggcttcccaaactctctagtgcagcactgtctgatagaaccttctgcaaggatggaaaagttctgtatctgtgctggtcaaagcagcggccacaagtcacatgtggctcctaagcaactgaaatgtggctactgtgactaggaactggattgaaagttttatctaatttcagttaattttaatttaaatgcccacaactgcatgtggctaccaggttggacagcatacatgtggaacacagactcctgatctgggagccttgaaagatgagccgtcactctgatgaggtggagggcctgaattgagccctgcggtggcactcggcaggtcttcagaggggctggtgacccctccaaggtgcacagcccctgggctacgagcagtggctagtcaggttggggtccctggcctctgccacgagtggccactagtggaagcctcaatgtctccacttccagtgggctctcaggcctcacatgcccatgccagggtagggggcctgtcgaggaggatgccctggcacccagagcttctctgctgtttgtcctgagggttcccttgggctgggggcctcaggtgcagggcacatgcagccggactgtccagccttgtggtatttgcacatgaactttcctgcgtggggatagacagccttattcttgtttgtgtaaagccattccaggaactattaatagttagactggcataaataagcctcaggtttggttcttgttagtgtcctacaaatccctcaaactttactcttttggctttttaagggagaagatttacagtatgttcaggcacaattgacaagaaacatacaagttgtgcggagatgagcagacccagggccccaggcctgagcctcttttctctcccatgccctgcctgctcaagttaccttgagcacaaatgatgtccttctgtgtgtgggatcacagactgagacatggggctgttcctcccctgaagtcacccctcaagttccccacatgattttactcctggctactccccagtttgctgtagtttgctggaccatgtgaccttggaggggctcacaaggcccagtgatgaagccaccgccagggctgagcctcagctcagccagctacttaatgcatgcatagcaagttacttaacacctactgacctcagtttcctcacccgtaaactagaaatagaggaacaattaccacagagagttgttctgaggatgcaaagagttcttgcatgaaaaattcttaggaaagtgctgcacatagtaggtattcaatagcattagctatttagattggaattagtggctttttgccatttactcctgactgtaggagctgttctctgggccccagatctccattccagcaatgatctctctcctccaactctggcattggaggagtaccacaatcctgcctccacatttcatttgctgacacccaggggcagcattaggtgtagagtgctggacatctaagggaagaggttcaattgtccatctgtttagttatttactcattattcaatgaatgttaattgagaccagtcagggcagctgagaagcagtgcggttgtgaggagggctgttagtaggggagatgcaggtgctggtgtgcttccgtgtatgaatatggcagctagtgcagggtcatgaagagggaatcagggacactctggggatgttaaaaactctgttgatgtggaatcagaatccctgggccagtcctgccttcctcttgctagctgtgtggccatgatcgagggtcctctttgatcctccctgatacatgggcgaggtgacccacagtggcagatgcttaaccatccaacatggagtcatcatcattacttagacacccttcatttggaatcacgattctcagtgtgaagggcacttcccaccatagaagcccctctctgtgagccctcagagggctgtctaatccataagccctttccctcccaaagaggcagcccagcgcatcactgcaaagcgccagctgagaagacgttctataaattatccaaagcctattctctggcacatccatattttggacctagctctgcccccgaagtcatataagcatagccacgatgggaaggatggtcataactcaacatgcccattcatataccttgagcacatatcctgtcccagagactgctgaattattgcatgagccccagctccttccacaccaaagcccttccgactgcatggacctcaccacttctgttcaagctcttccttcttctcatggttcctggaaagattctttatgtgctgaggtgttcagctacccttgatcttgtgctgccttccacagcatctacttggcaactttccaatgtcccacttcaggtgggcacagtgacctcctttgtctggtttttggcaaccatacctatctgttggacctgggcactgcactgacagccagctgacctccctgcctctctgtgtgggaacgtgctgcaaagccacatctctctaattctgtgtgtgtgtgtatatatatatcttttagagacaagatctcactctgtcactcaggctggagtacagtgaagcaatcatagctcactgcagccttgaacttctgaactcaagtgacccttgacctcagcctcctgaagagctgggactacaggcatgtggcaccatgcctggctaattttaaaatcttttttttggtagagacgagcgtctcactgtgttgtccaggctggtctcaaactcctgtcctccagtgatcctcccacctctgcctctcaaagtgctgggatcattctgaatatgaggtggtgacttttttaaaaaaaacttttttttttaacctaagtagaactttgcattatcgttggtgttgtcttttagatttagcccatgtattctctaatataaaacatgaagcttcatgtcatctataacttggagtggtatcccctttacatcttcaccagaagaccacttggatcagtgaagaccaagagcagagacctgtgacatccactagcgattgtcttcactgttgccactatcccagtgctctcgggcactgcattgaacacaaatagctccccttgctgcacaagtttcactgatgggggtaaagggggttatgaaacgtatcatatgatcaaatatgtgatagtgatcccacagacaaatggagcgtgtggggatgatttagacactcagccagccttgtcttgatggatacccatccttctctgctgttctctctttcctccatcctcaagcacagggagcttttggcgaggttagctaacttcggggcagctgtgaattagatactggctgtaagttacctccaacatccagagcatttaaacgctcggctgtcaatgattgtcattttcattgtttacatatagtcacatcctcagtttgtggggtggatgcatttgattcaattcagatatgcctttcaagctggccctgctgagctgggcctgaaaggcacatggctcatctcatctgcatgtgacagtctctttgaagtccccagaagtgcctgctcagagtcatgctcgggagggaagaggtaaggcacagaatgagtacagactgccacccagccgcaggaaaggtgactgcacaccagaggttcctggtaaggaggtgactcacccgcgactgtctcacctgtccaaagtgtgtgtcacctgctctgtgttcacccactgggttcatcagaggggcacttgaacaaaacaggaatgtcactggagaggggaacaaatgctgtccccaagtccttccctgccgtttagagtaacgcagcccctgtccgcacatcctcacccccatctgccctctgcttgccagaattatcagaatctctcaattctaatttcagccattctctgtgaaaatgaaaagttagtggcaggcaatggacaccctattgaaatagaaattgttcttcatatgtcagaaaagtcccagagtaatctgggagtaatctgagcaaactgattcaaaggattattacaatttcttagtcttctactgctgcaaaagtggcactctttgattctcatgtttgaggttctaattactacctcatgcaggacttacaagagatcagccatgctgcttacattgtgtgtagtgaatcaatgttattctgaagggcctcctggaagcagtagggattggagaatgtatgtcttttaacatgatcattcccatcctatgggggttgggcactcttaactcatgttgcagatgagtaaactgaggcttttgagagtttgagggtgcacagcttgaggcagaggtggaattcccagcttcatccaagaaatcacgaatctccaatggcttgcacacatccaggtttgctggatcctatttgtcaagaccacatgcagattaggagccttcaaacaaattatttccaagggagggcatctttctctgtaacccctaccctggcaattctccatggcctcagggagtccagccggaagctctgcaatgagtcctggggaactctcatctggaaaaaggcgctcatgacaggtggtgccaaccttccacggatgcttttcagcatctcttgggatgaggatacagaatttctctttcaccctgtaaatgtggtaaatgagggaatagaatttccagctttaatttttctgaataggattcaaaaatgaaattgtataaaaaggtatccagtgaaaaacacacacccatccccatctcccatccagttccctccgtaacccttttcttagtttcttatatgtcctttcagagtttctttatgcaaatacagtataagcaaaaaagaatgggcctttttcttttcttccttattttccacaaaatctatcaaaatgggttttttttgttttgttttgtttgagacagggtctcactctgttgcccaggctggagtgcagtggcacgatcacggttcactgcagcctcgacctccccaggctcaggtgatcctcccatctcagccttctgagttgctgggactacaagcatgcatcaccaggcctggctaatttttctattttttgtagggacagggttttgctgtgttgcccaggctggtctcaatttcctggacacaagcaatctgcctgcctcagcctcataatgtttttttttaatgttaaaccccttcttgtgttgagaggcctggcttgtgtgtttgagcgcagctgcctacctttgcagctgtaaatgtcagggctccaggagggctggctgggtctcccctcctcccctgttgggtgggtggggccctgagcttatccaggcatccctaggtggatggatgggtggatgggtaggccctggccttcagggaatgcactgtgtgtggtcttccagccccagcaaagtctcagggggcccgagcgggaagtcgccatcctcagggggtccgagtggggagtcaccatcctcacggtcagccgtggtttcgaattgagctcccaggggcggagactccattcccccggggaacaatctgatagccagaaatgagagcagtgagtgacttggacgctgtgtgattcaggagggtcccagtccctcagagtcgcctggacaccagattgtatttacaaaacagatggatgaggaaatggagattgggtcttcaaaagaattaacctcagattttatttatttattttaaaaattttaatttttcccaaggaccctttccaagtcaagaattgttttaaaaagaagcctggtgaaggcaaatgctgtctgtggccgaaggcaccgtgaggagctgaggctgacttatgtttctcctctgggctatgtgcgcctctaaggagttcacacactttaacccccttaggaaccctacatgatcatcctcgtttcttaaagaggaagcagagccagcaaacaagtgggggagccacagttccagcccaggtgtcactgggccctgcctgccccagccagctcctcaggagcacacggcaccccacgtgcgtgcaggggacagctgtcctcacaggaacagccccgggacctacaggacttcctggggtttaccctcagagcacccatgaggttagaatcacaaagcccgggagtcaggagacacagggcagctggagggaggtctttactgaggctactgaggcacagcagccccgtctagaggcctccccgagaggcacttcctgaggagtctggtggattttgagctgctttttaaacaaccttctccttagcatagacactgacactgaagggaaagaaagcaaatggtctgttcttagtgggaaggcaacttgctttcaggggaacgagtttgggggaagaggactggtagaagacacgactaagaaagtgagtaggagtccagacgtgtgtgattcatcctttagggcctctgtgtgtgatgggttgacttgtgtgtcccaaaattcacatgtggacgtcctcgcccctggcagctcagacgtgaccttatttggaaatagtgccattgccgatgtaattagttcaaatgaggtcatgctggagtcgggtgggcccctgatcccatatcactggtgtccttataagaaggggaaatttcaagacagacacacactcagggagtacaccatgtgaagactggacttaaacagctacaccaccagaagccgagagagaggctggaacatagccttccctttggaggtagcctggcccggtgggcactgtgatctcagacttccagccttcagaactgtgagacaatattttattgtttaagccacttattttttggtactttcttacggcagccctagcagatgctaatccagcgtgcgtcctgacagaggttgaagggggcttctcaagtcccaggtccagcttggtgtggttcagctactcaagagacatctgctgctaatggatgagcagtcaacctggacgcaggaaatcattttttatttgggtgaatacaatattctccttttgttttcacttttcctaaaagttaaatcaaggttcaaaagaaaatcgaggttcaaaagaaaaatttggtctttacatgtgctaaaaagaaaaaaacaaaaagactcatttcatctttatatgggatgggatccgtgctctggtgggctacagagtgtgtctctgtgtgggtccctgtactccgtgcgaggttggcggccgagccacggttcccatgtgagcaggacagcacagtctcacctcacacagagaacctcgcccgaacatggaactttcacccacgttgccattttcccgctccctttccctcctttgaggttcacactcgtctctccaaattaaaatttacaaagagaggagatggaggctcccaagtggccacaaagtcacattttatgtgagacctttttgcctcatttgctagttattgaacaaaggtgactctgaacctagcagaagcacgggttcaacacacagttcagaaaaacaggaaccatcaattcataagaacttaaagaaaaaaatagtttaaagaactgagaagttgccacattatagtgaaagaatgttgggttttggaaatgacaaaaacgagcaatcttcaccttgaaaatccggtggagtcagttacacaagacataaccgcacacaaacatggcatttctgatagtataatggcatttacagtcaagaagcttctttcagagtatttcatggaaagttattttagtagcaagggtagccttaagcagtgagtattcgtcaagagagtgaaaccttgacttcaaagtcaagaggcggaggagtgaggactcagatctggaggcgacctgcagggcgggtgcccacgcacaggtgtcccagctgtggacatcccacgtgcacaggagtgggccaaagagaggcccatggatccctgcccacctcagaaatgtgagcaggcagctggggggcatttggactctagccgggacaacctagtggccgggcaggggatgcaggcaccacaggtcacagtggtttgctacgagcgtcagcttttaaaattttaaataatcctcttattgtaaaattgaggacattatttgaagcaacgcaaaaaccatgtaaaaaaatgtctgtaggatgtgaatagcatgtttctttaaggcaatatctgaagaaaatataaaagccccaggtgaaagacaccctgggagcagaggtgcccctgagggtcggctgccccaggacagaggagggctctgctggtgcccaggtggcactgcctgtcttgatgccaggtgcaggggtttagaagaaaagacaaggaagaaaataaaactcaccaccgacattcctaccactagagttacccactgttcccagtcaggcatatttcctcccaatcctgtcctctctgtgtatttggtaattgcgtaaatcatctctcccataattaatctcctttaaaatttggaataatatagttgttagaataatataataatcatgcagaataatttagaataatgttgtttagaacaatttttgtagtcatgctaccttgcagtcattcataactcagaagaactctgcatttagaaggtctatttaaaatgtgccttctttgctgaagagttagttttatggtaaaaatccaataaaattgtagctaagcactgaaaaaaagtaaagaattaagctcagcctccagaaatactgattttatatatatttgctctggggaagattggtttaagaagacctatagcctgttaattgcccttttataaattgcctccctatattttttgccctcttttcccctccctccctcctttattccctctgtctcttccctttcccctccctccctcccttcattcctttcttccttctccttttcttccttttttttattgttgttctgggggaacttttctaatatcctggattttaagactttgatatatatgctgcaaatactttctctcaacctgtcttaactttctttactgtgtcgtttatattatggaactatttaacttttaagtagttattattttccttttaacacccaggttttgtcttgcttagaaagtctgttcctacccctagattcgaaaaatatcctcacatttttttcttctgatacttagtaattttatttttggtttaaaatgtcaagtcaagtagaacttatttttgtttataatttgaagtaagggagtttcattttaccctaaatgtgtagcaaattttcccagactatttattaagtcattcacttttttcctgctgaaattatgatatttaagttgataagttttatgtgttggggaggtgtcaaatgggcagtttccagttggaatgtgggattgggtagagctttgacacaacgtctgtgtctttccgactcccatgtgacttcagggcaaagaggcagaggaatggagctcagagcttttagagaatatgggccagaaacaggaaggagtcaggacctgataacgggaaccagcggacagtgaacgcagtggagggccactggggccggagcagccgagagatttcaggaggtgagcttcagagagcctcggcataaatggatccagggtgtggtcagctcagggaaagacagacaaccagggctgagcacaggccaggccaggccaggcagggcccccggagaatcacgttttagtatctgcatattgagaaagtttgaccttgagtgtgaaatgtagacaagcaacccaaataaaaaataggcctgattggggccaaaaacaaaacagattgatgaaaataatctcaagagtaggaatggacacaacctacaagaaggagactgaacccaccaagtgtggcgcttgagtcaaatcaaacgattagaggctgccaagtcggcccaaaccccaagagcgtgggaatctgggagggcaccgagggctgggctgagagcctcttttcaaggaagtctttccaggatgctgtacttctgtcttgccaccttgcaggccttacagtgagaccatgaagtccctggcactctccctgccggacccgtggccgatgttgatatctgctcggccggcctcacaggtgtgcgcgctgtgcagtcgcttagggcctcccctgcgcagaaggtcctggcttggtttaatgccctgctgttaccatcttaaaattcttaatggtttttgaacaaaggccgcacatgttcattttgcaccgctttgtaattacatgatttaaaactctgtgcttttctcttcctttttattaaaaacaagaatgtcagaaattgcccctttaaaactgtaaaacaagaaggcattaaactcttaatatttcaggtcaaatttgacactgtctctggacatgcaggtctgggtattggtgggccttagcccctttcctgctgagcccagaacatgcttctagtcacctagcataggtctctagggggcctctgccacaaggcagggccaacgccaaatgacatgcagttgcctttgatgaatgggactctccaccactgctttatgtaaacagcaggtcctgatatatgaaatgtggcttcaaagcaacttaaagaaatgaagggtcaaggatagaatatgtgatgagattctgataccatggagcctccagccccatggcttgctgtgcttgggctgtgttctctgtcctggaagggtccacagagagggcaggctgccagcaggaggcctgcctgctccaccagactgatgacacttattccacttggttcccagaactaagaggtcaggggccatgaaggactagttgcaggagaactctctgtcttaatttaaggcatgctctgtggagtggggctgttgggcagcctttccaatttatccacccatccctgggatctcttgggattgagaaactgagtttctccagggttcttctctcaccactcatatcctgcaaccttagggtcctccctgtactgggtatcagcctggtctcagcattcagggactcagagagaataatcagaggtgcatttctatcactgtgaggaccttaggctcaggccaataatgtaaagaagcaccctacctgggagaaacttactgtctagttgtaaagaaagcaccagggggccatgatgcccatcccacccatgttcccacccaaactctcctaaacccacagctcccaaacaagttctggattgtacagatcaggctccagccaaggtgagctcactgaggtcagagcttacagaatctgggagctcaaccaacatgatggcttcagagatgaaatacccagcacatccagctgcagttgccccataaggagcagaaagtttgctatcacttcctctgtactgtttttatgttcaggtgacctgtgggtcagttgttcgtaatgtggtgatgcctgtaaagggagcactggaggtcagggggtgccagtgagtggaggagaccattataaatactgtgtccccaaagggtgtacagtcaaataaatatagcatgggaaaagccaggttgacccaagagaaacatctttttctaaaaatctgcaagacttctcagagcctttggtcgtgcattttaaatatccaaatatgtgttttgaaaatatgtgaaacagcataacatttgtggtatatgttaaatgtagatgatggtggaactttctgtttttttcttagagaatttcatgggaccaggcttccaaaaaacacaaatgttttgaggacaaaacatatgaatattgtagaagattagaagcgataaattactataggcagaagataagtgacattggattgaaatttttaaaatgggaaaataattacaaatggaggagtggcatggtcagaggcggagtgcaggtgcctgtggcacatctgggctcactggctcaggcaagctgcggtggagcagaaggctggggacatgtgtgtagagtcccaactgtcagatcacagtgttgggttgggtctttcacctgcaggggcgtgtgtgtgtgtgtgtgtgtgtgtgtgtgtgtgtgtgtgtgtgtctgtgcacatgtgtgtgtgtgctgcttagagtttttgagcaaagtttggaatgatcaatgtgcagctttagaataatgacttggtgggaagaattgaagtgaggaaacactggagatttgtagccctcctagaagtcactttcagcatggatcttggtgtggcctggaaggaaaggacctggcttgtgggaggcagcagcagaatggacacatgagagccacaatcaagacagacgtggcagggtgaataactggctgaattgtgaaactctaggctgcccatatcacactgacattttgagaattcagaacagatggcaacacctgggcccctgcctgtgcagatgggccagaaaaacgtgacatgtgtgaaggtgggcatggggtggcagcagtttctctcgcccaagcattaagagtgttacagagcagaactgttattacggaattggtgaagcacctctgggggactccctctccttcccccaagtatatgttggctaagtagccaccaataacaaatggagacacctgcatgctcctgcagccactgcagtgtggccagctcctctgctgggctatacacgtggagatcgtgtaagtgaccagggccaatgtctctggcagccatggagaaacaggtggcccagcccggccctttcactgcccgtgatggacagcttgccatcgctggtcaatagctgcactcccagatagtattaggtaatatataattaataaagaatattccagttgatctggttcttttaaaacaaggaaacttcttgctatttggtacccacaaattccactactccctgaattgtatgtcctgaaatctcacaaatttgcatgctgacattgttaataaaagaacaggagataatttaaacagccctgtggtttggaagtcacaggttctgctgcttcatgttcatgcacgagactaagagcctttgaagaagatcacttcctagaccaaggctttatgtttggattaaatgcagctcctccagatcatctcccgaggagattcagccagcctctgttctctctactatccccgtcttcttgcctcatcccatgcacacatttatatgtgttcacatttatgcatggacatgctctagtgtgccctctagtgcagacattttatgcatgaaactttaacccctcttgcatcaaggcatataagcagaagagatgagtggaaagattttagggcttggaagggcaaacgtgatagtcactgtacattataaagaacaccaaatgacagtgtgctttggaatatactactaggaatgtttctgctttgcaattggaaagtaatgacattgaaaagaagtgaaaaaaatcacaggtatataattcagcaccaaattgatgaggacacagaggtgaactagaaaggcatcccagcggaaaccacttacagccccataaaagcaagatctaagcaatggggatataaaaaaggaagggaaattgatgaagatgacttggggtgacgtgacctggagtttagggagggacagggacttgccttggactcactatgggtgctcatgaaggaggcagcatttggacaaggccctgagaggcaggtggatttggatgtgcagtggtggtccgggtgtgtggagtgggggtcagcatgtgcaaaggcatggaggtcagcaaaccaaggctgagagcacaagaggttcgctgtgtgtcttccagctgcccagtgagcacatggaggtaaaggtgcacaacttggtaagcgacaggagtttgtgtggatcaggcctgctgtgacataaatatgcaaatgatgtggtccctcgtggtagcaccctcaggatgacgcactcttctaccaaaacatggctgaaaatttttggtgtgtgggggtgtaccctgggagcccatttagaagctacagtgaaaagagccctcattgcttcagctttgagccatctgggccctcccacctggctcatttcacctgacagtttctaaaacttctcacaaggaatttgtcggtttattacacatccatagaatgccctgaagagctattccaaaagaagagcttgaaagtcgaacgctaagcagaaaaacagtgacttccaaaccacagggtttgttcgaattatcaacttagtcctttattaacaacttcaaggtgcaaatttgtgagattccagacaggcagttcaatgagcagctggattttgctggttcccaagagcaaggaaaattcccttgttttaaaaagccagatccatttggaatagtctttcttccccacatattacagcatgaacgtgactctaaagtacctgccgagggtctttctttttgtgacggtgggcgctgttccccactgtcgtggacttctcacagcgctcagtgtgcattcggttgcttctctccataacgcctctcagctaactgtgctgtttctgtgctcctgggttgttaatgttcaagtcttggctctataccattttccttatcatttaggattccactgggaagacatcactaagttgtgaaatcaaacttcatgagttggctgagatcatagggttgggtgtcctctgagcacttgcaggctgggggaagacagaaaacctggacaacttgcaattgtttgcaacaaagtggaaaaactaaagtagttttgatatgtgcattagtttgcttggactgctataacgaaatactacttggtggcttaaacaacagaaatttcttttcttacagtcctggaggctggaagtgcaaaaggaaggtgtcggcaagatcgtttttttctgagagctctctccttggcttgcagatggcagcctgctcctggcacagtcttttctctgtacgtgctcatgtctgtgtcctgatttccttttcctagtagggccagtcaaattggattagggcctaaagtaattatctcattttactttacttctttaaaggccatatgtccaaatacagtcacattctggggtgctagaggttaagatttcaatatataaatttgcaggggacacatctccacccataacaatttgtttttcgtaatacgtttaaaatacccatttctgggctggatgcagtggctcatgcctataatcccagcactgtgggaggatcacttgagcccaggagtttgagaccagcctgggcaacatagccagactctatctataaaaaaaaatacacacacacacaaacttggccagatacagcggtgcacacctgtagtcctagctgcttgggggactgaggtgggagggtcgcttgagcccagaagtttgaggttacagtgagctatgatcatgccactgccctccagcctgggcaacaaagcaagactgtgttacttaaaaaataaaataaaacaaaaagacccacttccatttatttcacccatggataaattgtgtagcaagtggttaggtgaaatgtgaaatgtctggccaattattgtcatcatgctcaattatagagacacagtatgctcccctttgcattcttcattgctgattctgtgctttacatctggcagctacaaaaatttagtattttgctagcaggtgcatcaaatctatttttggtttcaaacaatacactttttgttttcagcgattctgaccagtagtcaacaattgcaagtatgtggaatgtgattctcctgctttgggaacaagggagctcccagttttgtgggcaggatccgacattcccatcataagggcggcctcacctgtctgtacctctgacacctcagtcagagcccttggagtcggctaggccagttttggccctccttactgagacctagtcattctgtagacatacttcattctcccaggcttgggcttctggttcaacctgtggctctgtcattatcaccagaagatatccatctggcccaccttctgtggcttttttcccatgcacctttcagactaaattgtatacgctcatcctccaaagggttggctgtctttggtggtattttggcctgagttctgccttggatttatgttttttgttacatatatatatatatatatatatatatttttttttttttttttttttttttttttttttgagatggagtcttactctgttgcccaggctggagtacagtggtgtgatctagattcactgctacctctgcctcctgggttcaagtgattctcctgtctcagcctccagagtagctgggattacaggcatgcaccgtcatgcctggctaatttttgtattttcagtagagacggggtttcaccatgttggccaggttggtctcaaactcctgatctcaggcgatccactcgcctaggcctcccaaagtgctgggattacaggcgtgagcctaccgtgcccagccttatttcataatttttgatcgtaattccacccacatgttctattcatgtgaaatttactaaggtgagaccaagtggagataaaaactatctaaacgaaaaacttaggtctctctttcagacttttttttggttttatggtggtaaatacaacccacttggcctttcccctgagactactggttcttttgtcactggagtcccagagatcagggtttgaactagcccaccacttactggtcatgtaactttgggcaattcagtttgcatccctaagcctcaatgtcttcatctgtaggatggaggtaaccataatgcctgtctcagaggctgctgctagtgttaactgtgggacacaacacagagtgaggcacagacgaggtatgcagaaaacatcagcttcgtggttttttactcttctgcacttgctgtagcattctgcaaaactattattcctttcctagactcatgcccaaagttacggaggacccagcaaccatctcctgcagcccctggaaacctcttgactcttctgtgatgtccccagtgatccagcagccctggccttcttttgatggcttgaacatttggtcttcattgaacagtttgtatattggaaacttgccagcctccatccacattccaacctccgtctgcatccctcggtacaaaatggttcaatctgtctacctcctttcacattccaccaagatattccaaggcccagggttcctttgaccacctcacacctaacaagttccctcactgtctctcactctcccctgaagattctaagctgcctctgtcctgctaaaactgtagacctgagaatgaagtaaggtgcttcaggtgaggcttgatcagcccagagcagaaaggggccacctcctcccaccctataagaccctattagtgcaccttggagccctttgcttggctggtggctacaatacacttctgttaatgacggaattccataacatttttccccattaatttctgctacaaaacacaaaagtcttagccaggtgtggtggtgcacacctgttgtcccagctactcaggagtctgaggtgagaggatcgctgagcctgggaggcagaggttacagtgagccaagatggcgccgttgtactccaacctgggtgacagagggagaccctgtctcaaaaacaaaaaacaaaacaaaacaaaacaaaaaccaaatacacacacacacacacacacatacacacacacacataaaagtctcatattttacacttatgaagttaggtgggttttttttgtttgtttctttgttttgttttgttttgttttgtacccaaaagtacataacctactactacctacctttttggtttttttttttttttgagatggagtcttgctctgtcacccaggctggagtgcaatggcgctatctcagcttactgcaacctctgcctcccaggttcaagcgattctcctgcctcagcctcccgagttgctgggattacaggcacctgtcaccacacctggctagttttgtatttttagtagagacaggatttcactatgttggccaggctgattttgaactcctgacctcagatgatccacccgcctcagcctcccaaagtgctgggattacaggtgtgagccactgcgcccggcccctttcctaaggttttctaaagcatgtttgtggcaatctatcttagaatcttgtcaaaggtaaatacaaggttcagggtttacggagccaccttctagccctttaagccaccagaattgctgatgtcttatggactcctgagaagtttgtggtggtgattcttagagctcagctcccgactgctggactgtcggtcactgggcagaaacagaactcagttctcatcacctggatgccgtttcatactctccaccctctcctgggcttcagttgccccacacaatgtcagtctctttgtgatggttagttttatgtgccaactttgctagggcatggtacccagatatttggtcaaacattatcctggatgtttctgtgaaggcactttttagcagattaacatttaaatcagtagattttggcaaagcagagtcataatgtgggtgggcctcatccagtcagttgaaggccttaatagaaaatgatgggctgggcgcagtggctcacgcctgtaatcccagtgctttgggaggccgaggcaggcggatcatgaggtcaggagattgagaccttcctgactaacatggtgaaaccccgtctctactaaaaatacaaaaaattagccaggcgtggtggcgggcgcctgtagtcccagctactcgggaggctgaggcaggagaatggcgtgaacccaggaggcggagcttgcagtgagctgagatggcaccactgcactccagcctgggcgacagagtgagactctgtctcaaaaaaaaaaaaaaaaaaaaaaaaagaaaagaaaatgacgaacctccccaaagaagattggattctgtcagctgacccaaactgcaacagggactcctggggtctctgcctgccagcctgccctgtggattttggacttgccagcccttaccattgtgggaacctaatccttaaacaactcaatctccactaccctcctcgcccttctctctctctctctctcacacacacacacacacacccacacacacacacccacccacacacacccacacacacacacacacacacacacacacacatccaattgattctgtttctttggagaactctgactaacacagtctccttctcagtattaatgtttttttcttggacagaaaatatagataaaatagaagtctagaagttctgttttctctcacgaccaaattcttctatttctcttttaacccattcagatttgtgagtcccggagcgtgctttgccagggctctgttgagttccacagtgcattgagcaccactatgtgggaggcactggctctcaacaggcagcaggcaccttttccctaatgaactgtctttccaggtttcactcaagccctttctatcagacttctaccatgcagctctgccaatttctttaagcatctctcccttcttcctgactgtcctgaccaggaaactccctaatctctaatatctaaagtcatgaagccaattgcatcattagatgcgcagtatatataaataacatttacttacaagaatatttttatagaaatgtatgtaaacatacttacatacatttctataaatacatttaaattcctaaagacttgtttgagcaatttaaaaaaaaaatgctccagtttaacttcctactacaattaggaatttggggcagggtgcataattgccagtgtactcacagtgactgcaattagaatgtgctgtggagtcagaggaactgcctgacagtgccgggcagttgaccctgggctgggttcagagctctccagtggccactgagaagtaggagagtgtttcctgcacaatcctgatttcttgggggaggaggtactactgcacgctgctgggaggagcctctgaaactctcctgggccaggtctcctcccgtgcttcctctccctgaggcagcctcacctcttgacgcctgtccccagcacacccttctgtagctttcctctgactcacccctctgtgtgtctttctctccaactcggggtcctgtcacctaggcctctctcctttttcctaggtggctggcagttgctcttcccttggttttctctaatttgatctctttcccacccttccagtctgccacagtcacccttgatatccgcagaatccaccctccttggaagggatgaggaagggggtttatataactcaatttcatttgtaatgtttcaaatggtattttttttctgggaataattggcgctggattctgaactatctttcctgttgcaaagaatgaaatcccttctaggtgatggggcttgatctttctctgttgcaatagcagcgatgtccaaaacaatcaatcagaggcattttctaccgtacctgagccattcagtggtttcgacctctgctccagattacccagggttatccagatgggttaatgcgagtccttagaatggtgtttcccaccttgagagtgggttgttggctaggtgtgtgggggagctgtttgtctacacctcagaaacgctcacaacagcaggttccagggaaagtccctgggtgtccagtaaaagctgggtcgccctccctagggggctctgagactagcagaactgatggccccataatttgagcacaggtatgcatatttcttaggggttggtgggcagactcattcatgttcccatcccaggggtgcaggggacccttctcccttccccacatcagcccagggccacagaagctcctcaggaggcaaggaagggaatggagaggacaagagtgcctacagagtgggaaggagacaagcattctcaggtatttatccagggtaagggcaagggcttttctgcagtccaggacattagaagagtcctgaaccaagaactccacccctgccccgatatcagctgtttttattgactgagctgttggagaacagttttggtgtgcggaaacagtgagatccctaaccctacacccctgaacccagcagatatatccacactgaccagaaaggactggctaaccacaagcctgcctgtgcatggcagggaaaggaaagccattcttgagtaaatggtgttcaaaggttgggcaatatatgtatatggtgttctcctgtggacataattgtgcacaagggtcagaagaaattgctttcattgggcaagctacttaacctgtctaaagctttgtttttttatgatctgtaaatgaagacagatcctatctcatggctctgcacgtcacacagcgatagcagacaggtaattaggatgcaggtagttagcagacagcctgggtgtactttagctgttcaagtttcctcaacctggcctcctagccatgacctttcacagaggtgcaaatcatctatgagtttgcacagaatcccctgcaaggaaatatgttcttgttcttgacttacatttgagttggttggtcttacagttaaggcggaggtcatcactcttaataaaggccattttaagtggagtgacaagtcactaagggacttgttggcattgtttacttcttatccagggctttccaagaagggacagtgtgtctgagtttttatcttatgaaggtttcccacctgcagtttagtttactattattctaagggctgtttataaatgaactagcttgtctttgcactcagggtaattcacagatttgtcagtgacttcattgcagctgtgagctttacacgaaccttgcaatccgccttgaaaaatgaaactgagtataagtggggaccaaggaagaatgtttttgagggaaatagaaattaccatcctaaaaatggttccttctgtgtgtctgctgatagaaacccttgacctctttagaaacaaccgcaaaattattcactacaattatctgaatctcataaataaaataatgattacagctgcatggaattattcaggtctaaattcatataaacatatccctaacaaatttatttatcatgacaggaaaggaaagcatagctttgtgcaccccatcccacaccctccaccccctacaaattttactaacactgtttctgggttcagaatttttttgcctgagttggtacctcaaatcacttgagttaaactgcaaatgaatcacacataatgcagataaaatgacttcatgccctaatttctagaacgtgacctgaatgtgaactagacattcgttttcctaaaccccatgagacccaggtattcttgacatgtgtagagaggattgaaggggcccgaggctgtctgtcctctctccgtgggcctggctctccttggaccaaatcgaatgcatgggaacacaccccccagttgtctttttccttcggtttatataattcctggcatgtgcctttcaacactccgtttatgttagaagtttggtattagcctcggggctttactcttgacactgctactaattctctactttatattcgtgattgcccttctgaaaggagaatcttgtttcaaaattgcacctgggcattttaaagtaaataggatgcaaatccttagttggcctcttgtgtacattaacttcagagtgaagaatgaatatgtaagacagtgatgggggatggggagttgagcaaggaaaataatttgcataatggtgtttgctccctggtgaaactgaaacccagcctgtgtgggtggggccttgtttccaaacgtcagcgctgctgcccacgaaggcctgcaccaacgcacggtgccctccgggccgcccacagaggccggcgtctggccaggagcaggggctggggacagcaagtgtgaaaccagctgaagcacctgcagctcaggcgggctgcaggctccctgctctccccctgtgaagaagcacacattgttctttcttcccgcacatttgaatctctcagtggggtctcattttctgtgacatggcaaacctcaaaaaatgggagtaaatcatttctaaagagcttagctaggcatggtggctcacgcctgtaatcccagcactttggaaggtcgaagtgggatgattgcttgagcccagaagtttgagaccggcctgggcaacatagtgagacctcatctccacacacacacatgcgcgtacacacacacgagcgcgcatgtgtgtgcacacacacacaaattagccaggtgtggtggcatggtaattccagctactctgggggctgaggttgggaggatggtttgagccagggaggtcgaggttgcagtgagctgtgatggcactgctgccctccagcctgggtgacacagtgagatcttatctcaaaaaaaataaaaaaatcaaaaataaagagctcctgatttccatcccccaccgagaatcattttctgagtcagctggagtgtttcagagcccaacacccaaggagcagtgcagggatggtgcccagttacaggggacaactcagctctgaatgttacaaagggcacttcatggaccaccaccttttctctgcttgctctgtacccctaaagtactacaaggcatttttggttaataataatttgaatactatgtgatcttgtagattctactgcgtttggctagctaatgtctctaagtagcaagatgatttattttttctggacaataccaggactatatgctgatacaggactggcttgctctaaggatcagattttccagtgtaaaatatatactccttatagggttgtaagagcagaagcccttcatagcctgtttctttttgctctctcttcagccagcagttggcctggatctttgctggtagacacagggaatgttctccttgacgagtggttcccaccctggcagcctcagatcccaccatgttggcagggatgctgaaatccacctgcctatcagcctttgtaaataacaaaaatcacaagtggctctagcatttatgtattctatgatattgggactcgtgatataaataatacaaatgcttttacatgcataattcaatttatactatgttttatctttaattactggataataaaaacataactactctcaggaagtgtgggggattgtgactcaggctaaggtgagcctcacagcctggaggctggctttagtgctggctgggagagctgcaaggagatggcatatgctgccgatgaaggtgttctccaggaattttcagttagaagttttgatcattgttcatttggcctcaggatgaacatcatggtactgctcttcattctctataattaatatacttttcaccgtcaactttgcatttgaaagtatttattttatgggaaacagtgaaaagtagataattagcacatgtgcaaatctgtttggcatttgtggggtgtttgccctgaaaacctatggatgaagcccaaagacaggagctggggggtttcatttagttaacttaaaagttttaattggtctgtgttactcttcttgttacatatttttttaaggccctaaggtgagcaagttacattttaaaataaggaggaaaagccagttttaaaagtagaattgagtcattgcatgtgttttttttcccacaaacattagctgtgtgattattatgtcccaggcacctaaggaatagtgcccttgtcctggggaagttcacagtttggaaggggagatagttgggaaaggtaatgtgaatattaacactcgtgtttcctgggggccaaaatgttccagcttctgggccaggttaattatctgaattatcttatttcatccttacattgggaaccagatgtccccaatgcccttcagtgatttttttggtggctttgaggaaaaatgaggcccagagaggttatgtaacttgtccaaagtcacacagcaggtagatttaaagtcaaacagttagctcccaatgtgcacactcttaattaccatgccactaaaccagactctgaacaaagcactctgggagcacagagaagacctctgagggtctgtctgtgtgagtctagggcatgttcaaagttaagagctgatgtttagctcagcaggaaagggctggggcacagtgttggatacacatatcaggtggcatttattgctgatgacagtaaaagaaaagtgtaaaacaagataatttgtttacatttcaagatacattaagtttttttttttttttttttttgagataagagtcttgctcggttgcccaggctggagtgcagtggcgcaatctcagctcactgcaacctccgcctctcgggttcaagtgattctcgtgcctcagcctcccgaatagctgggactacaggcgtgtaccaccacgcccggctaatttttgtatttttagtagagatggggttttaccatattggtcagtctggtcttgaactcctggcctcaagtggtccacccacctcggtctcccaaagtgctgggattacaggcgtgagccactgtgcccggcctcaagatgcattaagttttaaaggcccctggttatttctcgtcttctgagatgtcattccagtgtgacatggttaacatcagtgaggatggcattcctgtcccacacagtaaaatgtcacctctcacacatgtaactctgggtgtaaagtgagtaaaaatatgagacttagaagaatatttcatcatggtatgctgactggggatttcacttactgatactagaaaggttttgcatttcagaacacgatgaaataggtaatatttatctgaaagacgcagacaagtggtggaggaaccagacacccccagtgccatttgctggcttttatcagacagaaagcagaaaggagaaacatgttttatcccatgagaaggaaatattggcttgatgcctaccatgcccagccttgcactagacatccaggtagctgctccatggagaagttcacagggtggtcaggatagcacagggaggaggtaatacgcttgagggaagtccaggagggactcagggagtgtaagccagtaggggggtgctcctgagaaagggaatgaggctgtgccttgaaagactgattagatagaggaggaagtgaagcatcagaggctgcccaacagaggcaggagctggggctggggtgggcaaggagaaaatcacgccatcctcctgtgtggacagtagagtttcatctgctgagggcagaggccatgttttatccatctctgtccccttctatgtccctttttctcctcccttccccattccctggcatcatattgggacttgttaagggctgaattgtgtcccatcccaaattcgtatggtgccaccccaactccagtaccttggaatgtgaccgtatttggagaaagggtctctgaagaggtaattaaggtaaaatgaggtcatatgggtggcctctaattcaatatgacttgtgtccttataaaaggagattaagagcacaccaacatggcacacgtatacatatgtaacaaacctgcacattgtgcacatgtaccctagaacttaaagtataataaaagaaaaagaaaaaaaaaggagattaggatatagacatacacagagggaagacccacatgacaacatagcaagtaggtggtcatctacaagccaaggagagagggaggcctcagaagaaaccaccctgccaacaacttggtctcagacttccagccatcagagctgtgaggcaatacatttctgttgtcagtctctaatactttgttatagtagctcaagcaaactaataatccagtgctcaacatatttttgttgaataaaagcacaaagagattcatgagaagagggaaatgttgcatacttagggtaggagcaaaccacagaggtctttctcagcctgggcaaagaatgtcaactctgtgttggagccagtagggagctctgtgggtcctcgagcaggaaaatcccatggcttaagcagtgtttcaggaagactgggatgttaggctccggagctctgagcaagtcagatgggactgggagtcataagaaggcttgactgtggctagtgataaccaatgagcactggaaacatggaggggaatctttcctcccttttatatcagggttctctcctagaggagcaggtgaggacctctgatggaccaggaaattggaattctgcctgggaggcaagcccatggaggccctgatctgcttggacagagagtagctcccttcacctgtaaaatgagagtgaacgagctggtgtctaaggaattcagaatccacacccatggagttccacagggtatgtgggattttagggggaccagggtgtccccagtgcaagaaggaggctcccaccaaggggctgcagcactgcagataacccccaggggtatgaaaagaggctgaactgggggcctccacagtcagaatccatccattgacccaggatgccaggaagggggaggcccatgggcagcagaggctcaacgaactccgtggcctgacttggccactaggttttttcagctcttcagccactgcctgtaggaggctagctggcattccttccttggcccttagcttgcatggatcggggtttcacgttaaattctaagcccaataacatggctctttttatttaaactcagtgctgcacaatgatgaatgaatgaatgaaagatcagggcagatgaactgtcaaacctcagcagttgcccttatagttagaggtgtttctgtgaagcaaatcaaagcttatagtatcaagaactttttaaaaaagtacactttgatccaagttggatgttatttctaagtgtactcagggtgaacacctcttaaaaccccttattatgtatgctgagctattctgaacctcagtgagaaatcagtaatgtcaagaaacctatacataattatttgttataatataaaaatccagagctcttcaagcattattctatcctagttggtcagattctgcaggaatctgagcctgaaggaaaataaattccttgagttgaagaaatttgtgtcttgtaaaaaagctgaatgagaaataacgttaaaaatggaaggaggcctaatgatgatattatgccatctcttgtcattacttagtcctctgttgtttcagtcatttaatctggttttctttctggatgctttaacttccatcttaattttccttataattgttgtgcaattataaaagacaatctgagggacccgccttgacagcctggggtaatatcactgggagtaggatctctcagaatgctaaggagcagatgcactaagagagctgcatttcactccattttattggatcttttggtatatacgtttctgtgactttagttcaatgggatggactgttgcataatactgagggctatatgaaggaggagtcgtctacacttgtaaaaaccttcttctttaggggtgggtagtgtataattgcaaaggcatttctgatttaattaagagttgtttggttggccgggcgtggtggctcacgcttgtaatcccagcactttgggaggctgaggtgggaggatcatgaggtcaggagatcgagaccatcctggctaacacggtgaaaccccgtctctactaaaaatacaaaaaattagccaggcgtggtgttgggtgcctgtagtcccagctacttgggaggctgaggcaggagaatggcgtgaaccctggaggcggagcttgcagcgagcccagatcgcgccaccgcactcccgcctgggtgacagagtgagactccgtctcaaaaaaaaaaaaaaaaaaaaaagagttttttggttacaagtgacggaaaactcaattcaaagtggtttaagcaaaatccagagttttaccatctcatgtaagtgaacaatctaggaaaagggcgtcatacatacagctcaaaatgaagtcaagatatttcagatctgtcttctcctcctggcccagtttttaatgctttgaccccattctcaaataaactcaaccctcatgatcccgaggtggctgccatttgtcctttcaggtccaaatccagcaggaaaaacttttgtcacagcattcctgtaaaaggtatgaggttcgccctgattggaccagccgaggtcacatgcctacacatgagccaatcacagtggataaaggactgtgatgtactcattaatttacccgccattatctccactcctgtcctgagggtggagttatgaagcttgctaatggggcactaggatgtccactaggttttactcagtgacataggtgacccactaaatttaagcatattggtgtgcaaaggaggcatttgttgacttgcaagtagacacctctcacttatttgtcacactcgctcttccttttgtaagcttcctgggagagggatctcagtggctttcaagatcaccccttgcaaattaggcatcatgcccatcattccatcccctgtgtgagatggcggcagaacagttcctattcagacacctgccctcatgcctcttcccccgtcctcccagcagccccagctcctggttcccagcatctagctccttccttatcagcacagggagttgctttttgtttgtttgtgtttgagaaagacttcttatttcgtgcatgcacatttcctttctgtgaagcagactcgggagctttgcctttctgacttattctgtgcatcctatcagtgaagtcagtgagtggcttcaaaaatgcttgctttctttctttttcttttcttttcttttttttttttttttgagacggagtttcgctcttgttgccctggctggagtgcagtggtgcgacctcggctcaccgcaacctccgcctcccgggttcaagctattctcttgcctcagcctcccgagtagctgggattacaggcgcctgccactgtgcccagctaatttttggtatttttagtagagacaggatttcaccatgttggccaggctggtctggaactcctgacctcaggtgatcctcctgcctcagcctcccaaagtgctgggattacaggcatgagccaccgctcccagcattttgtttgtttgtttgtttgtttgttttagacagagtctggctctgtcacctaggctggagtgtagtggcgtgatcttggctcactgcaaccttcacctcctgggttcaagccactctcctgcctcagcctcccaagtagctgggattatagtcacccaccaccgtgcccagctaatttttttgtatttttagtagagactgggttttgccgtgttggccaggctgatgtggaactcctcacctcaggtgatccacccgcctcggtctcacaaagtgttgggattacaggcatgagccaccgctcctgacccaaaatacctttttctttttttttttttttttgagacggagtctggttctgtcgcccaggcaggagtgcagtggctcgatctgggctcactgcaagctccgcctcctgggttcacgccattctcctgcctcagcctcccgtgtagctgggactacaggcgcccgccaccacacctggctaatttttttttgtatttttagtagagacggggtttcaccgtgtgagccaggatggtctcgatctcctgacctcgtgatccacctgcctcagcctcccgaagtgctgggattacaggtgtgagccactgctcccggccccaaaatactttctgatgctgataaaatgttttgtctactcttatgcccaaggaacagttcctcccttagcagaagttagtggttaaagcttcctctatgtttgccagtcaagaatgccacagggccagcctaagtgtccatgagtggatgagtggataaagaaatgcagcacacacacgtatatacacaatggaatactattcagcttttaaaatgaggaaatcctgacatttgcaacaacatggatgaacctggaggacattatgttaagtgaaataaattaggcacagaaagacaaacaacacatgatctcacttatacgtgatatagaaaaaagttgaacttacagaagtagagagtcgaatggtggttaccaggcattggcagggatagggtaatggggagatattgttcaaaggatacaaaagttcagatagataggcgaaataaacttaagagatctactgtacaacatgtgactctagttaatagcaatgtattgtattctgaaattattgagagtaaattttaattgtcttcaccataaaagataagtatatgtgaattagctcaattgagccattccttaatgcttatttccaaacatcatgttacacagtaaatgtaatagagtttttgtcaattaaaaaaattaccaaaaaataaaaaatgaattccatagagacgttctctccaggaagggtccccttcctagatctgactactggttagggttaatcaatgccccttggcaaaacaaaaccaaccccacatttcttcatctcccatgtccaagacacatgcagtgagttctcagtgtttactaccagcacacaaatgatggctgctttattatttggtgacctttgttgtttgctgtgattgttctgttcagttttagtccctcacagcactttcggccatttagaaagacagtatttgttctgctagagcatttgcaatctgtttctgattagcttaactggtcttgaccagtgctaagttcacacttcagctttgatttatgccgtctctatctgcagatatgtttcttgttacactatacaagaggaggcctcttcttattgacttcttattttcatgtgaacgaggtaataggtatcaggaataattagacaaggccatacgcgctaatgtcataggagactgagatatggagagtaaataataacaaaattcctgattactagggcatagaaaaaaaatcataggcaactccccaagttgataatcccaaatgtctaggcgtccttctcaaatagggaaacgtgacattaaaactactcaaaataaatgagactcagtggtatttataaccatagataaaaaagagcaagggtcctggggaactgtgccaaggcccagccctttgattcacaagtatccacaaaaacagactgtacgggctgctttcaagagaaaatgtggccatcaaggtcaacactggaagccctatggccactcattcattccatctcattggccctgagcctttcgaaaagtaggcagagaagaagcccaaagaacaacatggcaggcaggttaaggaagaaagcagagttcacagacatcactaacaatttcgtaatgacctcatgacttcgctggaaggattccagtggaggcgtcaccagccctttgtccacctcttaggctgagaacctcaaaggttgcccacaccttgaccacatactttcttccttttcttacacaatcaagctctgcaccaaacattagggggacatttgcattttcattatattcatgcgtatttctagcaaaatacaaattcttacaagatgttgacttgtacagtgtggcaaggaatactgtcatacagttgtgccaaaaacaagcccatttacttatttttttaaaaattaattatatataattcttataaaataacaaattccatttatttcctcttgatctctgtcatcagagacatttgaaggtcggaggtgggttcaattgaaagacataatgcacttgacaagttgttgtatgtgtgcattgtgaataggccttaacagtgcattcatttgttttattttttcccatttatacagacttttgttctgctcttagataaaatactaataaacaggaagttgaaaaaaaaatgtggtgcaattgttctgaatgttgtttttcttgcaaggctttatgggctacaccacaccatcctattcaaagcagtccctgtaggtggtggtgttaataaagaaatgaggctgcccagggccgcctgcctgagcctctctgcagctgctcacctcctgctgaggcctctgccttcagagctagtggggcctgctcacacattccagtagtttcctctttatttgtcctgaaccaagttgtagaatttaaaggaggtgaagtaaggcgatttctatggaaaatatatttttcttctttactcctcatgctgagtgcataagaatttattatttcccctgaatgttcaaagtggtgtgtgtgtgtgtgtaaaagaaccaggagcaaacaatcttaataggaatgtgcgatcttgtgtttatctttagcacacttaattagctacaacccgggactgttgccatttgaacaagttgttaagaaaatctgccatgttttgctcttttttaaaaggaatgactttaataaccatagcaacacttactcagttttgtgatccactccaagattatgggagcaagaacagatactcctgaaagcaaccctcacctcctcccccgccccctgccctcagcaagtcctggcctgtgtgaactgaagggtttggaagctctggtttctaggagtgcccagaagctagaaagactagggtgtactagttattgaggggcagttgtcagtggcagtgtgggggcaccccagttgttattcgaggcactgcattgcttttttgtctcctctgtaagcatcctgcctcagtgtcagggcttgcagaactaggcctggagttatgccccctacccaaccaaggctttgccttttgccccccactatggtgccacctacttgggtttcccacagttggtagtgccaggcaggaagcaggagtgcaggttgcaggaagggagagcagaggaaacagaagttgcttaggagggagttgggcaggctctgtccccagcagatccaagggtccctgacaaagagaacacctcacctccgcccctccccagaggcacacagaatgccccctcccaccacctccaggctgttaattcacacccacccaggctgcccccaggctccccagacctgtgccagtcaagcctggcctgtggctgtgacacctgcattaccccagacggttgcctgacctaggcctgtccttctatctgctttgtttttatgttgattactaggtgaagcacagtgttaaaaacgggaagaaaaggctaggaatgcagttatgggagtgtgaggctgggttggaataggtgggagaaagtccagggctgagtgtgtggaccctgctctagggatctgaccggctcaagctcccaggccattaaacaaagttgttaatgaaaaaaaaaaaaaaaaaaaagggagagagtaaacaaatctctcctctgttattctgcacctggagaaaagtaaaccccttgggcataataggctgtcaccaattagacatccgggaaaggcttttctgggtttagcccttttggggaagcatgggggtagatgtaagtgtgtgaaccttcacccaagttctggagaaggattccagagtgaaagaggtttccatgctgagtcttgcatttaagggaccttccatggcatagctgcaaagaaacctgaattgcccaggattaaccacctttcctttagacggtgagcagtgtgtttcacgaacacattacacattttagggttgtctatggaggtatcggcactttcattactatttttaacattttattctctgttcagggttaagaacttcacccacctaagtcagctcctgatacaacatggaatgttccagcaatgaaatgtgaacttaagatatttggattaaaaccccaaagttgagtcaggtttaaatattctgcaagaagcagtgagctccttttgtctatttgggcacagttttcgtgaattatttaggcttttcttagatgcctgagctccgtggttagacagcagataagttatttttccctttaatgctgaggcattttcactgatttcagtcttactcattagaaaattctgtgctcacccacagctgccagggtttctagaacacaacaccctaccttctcctgtagacattttagtccgtcctcgctcctgcactgtggctttcacagtcaaatgtgagttgaccagccgtcatttgtgagctgtgagcggtatttttggaacttgcccacccccgttcccccagagtcctgtggaggtcatgctcatgggttctgccaccgggacaggaaagtttggacattactaccaaaaaaatgcaacgtgactaagcaccgtttaaaatagcctttcttattctcttgtaaaattgcagggatttccatgacagatgtcgttttagtcattttaaaacttcagcgcgctgaacctcatcagcatatttttatttttgacatttcatattttagagtggattgaaaactaatttgatccatttcaatttggaacatccctcaaggtcattttaccagcatttaggccagtgttgatcttgctttcattttaaacatagttattttctctctgtgaagtgattactccttgcttggtgtgtggtctggtgacttgttaatttcaaaattctacgatgcaagcgggtttggacgtggagcctggcccggtgtggccaggctgtggctttgcccatcgcaacggctgcctttgcctcaaatggctcgaggctggcacctggtcaatatttgcttttgtccaaaagaaggaaacagtaggggacttgggtggtgtaattttagaactttactgttgggttgttggcttgaaagatccattctcttctataaatacagatacatatttactcctccaacctttccctccacacaattaagaaaccctacaattaattatgccaaatcaagatttgcttttctacatgattttttcccttttccctaggaagtctgtaatgaattttcttctttattgtaatattttatgtttttatatacacttgtatattcttatagcacatatatgtatatatgcaaactttctgaggcttctaaaaaagagaaataatattggttgattaacctcaatttcttttcaatatcaaatgtgtaacaataaccccaaaaggagaggtttcagaaattaaaacaagttgacatttgcccacttctgaattaaaatgcagcatttgacttttgtactgttttggctgtcaagccttagttttttcacactatcaggtattttcagatcaaaggtaaatatgatttagaattatatttcaaattagaactgtcatatgcccacacatacattttgctgatatacttacaaactggtaaacaatgctctttaatcaacaattcataatctgggtcagcgatttttatctccatatttgctcatactgtatgacatcaatattttatattggcttgcccataacttaatattttataaaagcctacctatgaaattcatatttcatatttgcttggctatgaaattaatttttgtgatgctgcagttcaccttgtagcatacaaattgagaaaattagcaagctgcatgtagttccttgctgtacaaaaacaaatgacacatggtgtctttatcacttgttttgtatttacagataaattttaaaaataaaacttgccatttctgttaacgtggaaaactccccaccccactcccattcttgttgactcttttttatttttaaacaacaaatacataatcaacttcagtcatctcattttcaggggagttactcattgtattttctacttacagtcaccggggctgatgttgggatctgtgatcagtttcctgttgttacgcatagcttttctcagcggtgagagagacatcatgtacagagtacacacggagggttgagatagcagcctggtttatcttacttctgatatgacttttaaaatattgattttaaaagtgtgtctttgagtgtaccaaaatagtatgtccctgatgcttctcgctggatgcaatccctgcgcaaatgctttctatgcaattagattttggggctcagcttccattttttaaatctgtgaaagcattgatcatgccagcggccctggagagggccactctgttttagtgccatttacatgtatcaggacaggacagaaaagggacagcatattacaaacaaaataaaactataatcttgttcaatccttgtcatgctgaggatgtttgtaaatataaaaaaaattgtatggattccacttacatgagataactggaggggttagattcatagagaaagaaattagagcagtggttactagtggctggaggcaagggggggaatgaggagttattgtttaatggggacagagtttctgtctgggaagatgaaaaagctctggagatggatggtggtgatagctacaccacagtgagtgtacttaataccactgaagagtacacttaaaaaatggttaaaatagtaaattttatgctatgcctattttagcacaataaaataatacacattcatggaaacagggcatttaaatcattatgcataataaagtgagaagctagttgtgatttgcaaagaattatagaaattatagggagaaacacaatctcaagagccaccctggagtccagagctctcgttttacagattcaggagtggaggctcaaagaatatatgctttcttaatgactggaacccagacggcaggacccccacacagggctccttgctgaccctttgctgccttcccccctcccttagaggggccattctttattctgagtaaacgtgccactgattagatgggcttcatgataaagacctgcagtaaggacgttttaatcctttaatctagacggttcacgagttccactggtgtgtctctgggggcaggctcccagatcacagactggttccaccgtgccccgtgacctcagcgtgccattagatgggaggccgttatttcaggggaaaaatcatgtttgaaactaagtgggtccccggcagtttgcagcaacactggctgctcaaaaggacagcacgaggcttttcacagcatgtagatgccatggctttatgagagctttgagcttgggagggtctacttgtgcttttgcaaccttagtttagatttcatttgcatctactatttgtaagtgcaccatttttctacgggaagtatgtatgtgagaattatctacatgatttttgtaggtggctcacaaaacaaatgtcagtagccattctatggccttggagtatcatttcccacaccttttctatggactgtctttatttttgactctaatacgtatcccttatcatacaaaaagttcttgagcatatttgatatattttaaaacttccaccccagtggaattaacactaattatatttaattccacacaaacttttgtcccagttgtagaccatttacctacttcctgacagcaaacactacaccgctgtgaaattttattttaacacatttgtgcccattttcagcattaataatcgtgtgtggaagtggcagcaaaatgaagatatcgcctgagcatggaaccacaaatgcctgaacgtgtgatggcatttgtgaaacaaaagcatgacatactttttctttccaaatgaggcagtgccacaactaaaaaagccagttcgcctttcgctttctaaaatcatcttgctggagagaacggttatcaaatcccatccactgcccatgtaaaataaataccattcagaaaagcgtggcatggatggccatacttctgatgggtttataactgtagattgcatacgatcccaacgtgaagcctgaaatacgacattcaacgtcaggcttattccaggctactgctgtggctacttttgtaattcaaccagtggggcgttttaggctaacgtatattgcctctaagctgataagcattttcctgatcccaggccccttctaaaattgaacacacacgttcagctggggacacctagatggaaggaagggaaagaggagaacccgaagtgaaggaaaagtcaccaagaacagtttcatggaaaaaaaaaaaaaaactctcaagaattaagaatgttgagttgcttgaatggagcttgggcaggaaaaagaccataactctcacacacgtgaaggttactgatacccaggaggtaaaagaagtatttaacatgctctaaagaagggtaaccagagtaatggggcgaaaccaagggaggacgtcctggaatgtaatattagaaataaacttccaaacagggaagtgtccatccgagtgtgaaatgggtttatcagaaacaagctgcatgccagtttcattgacattgcaaagaaggttagaataaaaagctaatgaacagaaagaagaaagaggcaaacagggtgtgtgttgagagtggtggaatatgaaggatggtgcatttgtccaggctggggctgctggcctgaggaatggtggtggagtttttttacagagcatcttctgagcaccaggagagtcccggaagctgagtttgacactagcaagacctgccctgaattggggactgctggatgcctggaagctcccctacacttacgttcctgaagttgggctttttatcaccttaggactatggcttcccaaacttggcagtcagcgtcccggcaaaagcctctctattactgcgaggtagtgtttatggagtcacagctaagaattacagaaaaaatcataataggtgaatcttttttttttaaaaaaaacaacattttttgactttgcaaataaattgcagaattatcaccattgttgaaatattttccattaaaactagagtttattaaaagtgcctggaaggatgccccctgctgcctccctgagtcatcgctttggatttgttcttcagaggcagagatttatttccatagcaggggttttcagttttgtgcttacagtcccgcagtaagtcttactggcttcatcttctgacctgcttttaaaacagtcctccaccgtgctaggtacacaaagggatactttttgggtttttttgagacagagtctcgctctgtcacccgggctggagtgcagtggtgtgatctcagctcactgcaacttctgcctcccaggttcaaacaattctagtgcctcagtctcccgagtagctaggactacaggtacgcatcaccacacctgaataattttttttttttgtatttttggtagaaacagggttttgccatgttggccagactggtctcaaactcctgacctcaggtgatctgcctgtctcggcctcccagagtgctgggattataggcgtgaaccactgtgctgggcccaaagtgaaactattataacaaggtaagagcaacttttcccagagttaaaggatggtgctccatggaatagtgaaagtctgggaccaaagcaccttttccctttaatttctccaattgcttttaaaatattctatgcaataagcatctgagtccaaagggaggctgtgtcttcctctagggtctctctgaatgaggtcagtttctatgttaacttttacgcttccttttttgtctcatcccaaaccatttctcctcttgtcatcctctttttcctcctccttttccttcttatttctcctgttgccttttttctacctttttattttttgccaatatacataaaattgcttgttaaaaaaagatcaaagacagcatttttatatttttttcttaaaaaacaatatgaagggctgggcacggtggctcatgcctgtaatcccagcactttgggaggccaaggtgggcggatcatgagctcaggggttcaagaccagcctggccaacgtagtgaaaccccgtctctactaaaaacaaaaaaattagctgggcatggtggcgcacacctgtagtcccagctactcgggaggctgaggcaggagaattgcttgaacctgggaggcagaggttgcagtgagctgagatcgctccactgcactccggtttgggcaacagagcgagactttgtctcaaaaaaaaaaaaaaagaagttaaaccatgaaaccacccataatatattagtcttcagaaagaaaagaaaaccaaggtaagatgcaaataacagaagtacaacttttatttttctaattgtggagtgactccaagaggattctgctcccaccaggtgggcgataggcgtcctgttggtggcgtgtaaaggaatggaaagctaccacgacctggggggtccaagaggggctgctgcaggtagcctacccccccagccttccccatgaccacagccacccactccctcaaagtgggacttcaggccaagcaggggaagatctcaggcgaggagaaacagtccatccgagagctccctgggagaatcttgtagactacacgctaatgagataggcctgtcgccaaaggtcacctccgcactgtcttggccacaaatgaggcctgaaatcctgctattagagttgcacacacacaggagcctcctctgggagttctgttaaccactggtctgggagaagagacggcacagatggcctccccagtctttccagggcagagcggtgggggcgggaaggaaaggaagtgccgagtagttcaggagagggggtgggcatggggttggggggcagcctggggacactatggccccatcctagcctggtgggagctagaggaacagggaaagtaagtctaaagtaagctagactcaggaaagggaaagaaaactctgcgtgtctttttttctttccttcttttcctgacacacatagtcttgtgctctctctgggctggttccactagtgcagcgatgctatgggggaggggcccagggccctgataacaggtgggcgtgtgtcaaatagcaactcaaccaatgaatgaatgaatctgcctctcctacctctccggacagttttgaagtttaggtgaaaccatgtgtacaaaagctcctgtgaactgggagacactttgcaatcccaaagtggttaataataaaaatagtaatacttttaaaaaatcataacaaataataataatgctattggaaccatcaatctaatacactttttttctgtgagagacttattggattctttccttggcatgaaagccctgcttctcccaacacaggcaggctccctctggcacagggtgattgcatcatagacctgacccaacgtgacagagaagcggttctttctgagttaccaatggccatccatctttcagcaggcgtgccttcccattttccttgctctgcccatgagaattttcagcagaaccttggattaggtgtgccagacatgttctactcttgattgtgaagattatacacactctcaccttctgagataaatgttattaaattggataaacaaccttgtgtagttttgcttttctgttttatctcaagatcctgctgacatggctaacagggcaactgtgaaaagatttttattcgtgtctacatcagtgtgaaaggcttcatcctggtgtgtactaatcactcagacagtggtatgaataaatgaaggaatgcattgacaaactaatacacaaggtgattccggaaaggcgcacctcctgggataaatacggtgacagtggtgagtctgctctaggtctacgaagttcttgctcttagtagagatccagacacccaatgttgaagacagttcctctttgctttagaaagctttgtgtgcaagagatggcaaactacttcttaaaaaacagagagtcccgtaaacatatgccaaggtccacggtgctccaggcagggtgcttggtgccagagagacagagtgaactgagctggccatggcatctgtcctggagaagtcacactccaatcaggaaggcaggaatgtgggccagacctacagcctctggggaagggtgtccataagctgtgaggtggtggctactgactccaatggcagagaaggtgtggtaaaaaggcaaggacatctgcaatccttctctaactcttgacttattgttatctgcagcaggttaaccacccctctgttaacttccttctctctaatgaggatattaagagtagttgcctcagaaggttgagcaaatttggtaatttacacaatgtgtagttgtcccttggtatccatggggaattgattctaggatctcctatggatatcaaactccaaggatgctcaagtctctgatacaaactggcataatatttgcctgtaacctacacagatcctcttgtgtactttaaataatctctagattacttataatatctaatgcaacataaatactatgtaaacacttgttatgatatttttattggcattatttttattgttttattatttttaaatatttcaatccatagtgggttgaatccagtaatgtggaacccacagatatagaggccaagatacctcaatgattggcagttccagcattgcccatctccctgtaccaatctgtgccaacctcggaactgtggttgagtcccaagctagggggtcggttcacaccatccatcccaccactgcagcagatgctcacccagcgtcaactctgaaccaaacaccattctgggcaggggcgaaggtgagaagcacagaccttggccctgctctcccctcctcaggagcccagcagagccagtccccacaggtgggactccactacccaagggaagcctgaggcatgaggcctgtgtgttgctcagtgaccgggtccatcctcccagtgccagagaaaaggaggtgcccctcaaaccacaaagtaacccttggacttctctttagctggggtggtggctgctggagagggccctgcttgctcatctctgccagcttcccagtccctgcaaccagcagtggccagcctctggccacccccatgaaagcacataaaagggttggggaagccgcaaccccagaattgaggtgagctagagtttgaggacataggttgcttttcacttatctccagcaagaaccatgttatagatcattggtacagtgacgattttatgcttctaattgaatactgatgaaaaatggcaatggtttctcagttacttcttggaaataaattgtgggtaaataacatctgcttaaagcttggaaacccagtttcctttggtttgtgtttttaaatgctttgacgatgcggtttgcttttttactccaagaaaaaaaaaacaattaaatagaggctgacaactaggtgagatccacagccaagctattctaagagcccgaagtcaccctggacacccagcttgatgacaaagggcagaaattcaatatggaaataggatccactccaaatgcaccatctccgacattatgatgaagagaatatgtatttcatgacagggcaaatgttgccatccttctgagggaagatgtaaatgaggatgcttttagggatgatttctacattgtcactaaactgagacatttgtgcttgctcgtgccaagtgaagattgctgttgctgttgttctctcgcagtgattagggttcattccctagcaacaggcagcagcagaaaggaagctttgcaggcagagtcaccgaataaacgcagtgggaacagtatcaacaacaaacccagtgatgaagggaggggcatgtggggcacaccacattgcctctctggcttctcgtctgcacctggggccagaggcaggtgggaaggagaccttgacaatgtgggaagtccctttgatttgctgaaatggaggagttcacattttactgtgcagtctaacattgcccattctggattagctccatcagacacgcttttgtgctttactgtaactctttctttatttgtcctcctcgaaactgatccataatgccaatttgctgatcagctgtccctgggacttcggtgtactgggctagaacctcagtctagtgttcaaaggagctggcagaatgggttgtctcggcatggaggacccaaaagcagagctccctggtgctttgggggagagtgaagcccttcattccactcctcattgcagaccagctttcctggtattcatgcactgctttttgtaacgcctcaaatgaaggccacagctcagccaagtagaagagagctcctaataaatgaagtctggttgcctttgaatttataaaataatcaaagttgctatttcctgctaaggagacagatacagaacaggtgataggccacagtcattactgtcccctgcttgttccctgagcccctggccttctaccttttctaactgctgtcagaaccctggttggggacttccttttgcctggttctcctgggcttgaatggcaacctatattgacagatttcatgccacagttctttttcaaacaagatgattcacaatggaataattgggtttgggaagaaggcctttttaaagcaaactatggaaaataattgatgagtagcgcagttttataaaacttttttttctattaccctttaaaaactatgttgctaactgcacatcacactgcattcatatcctgggactaataccccttgacctctgccatatgaattaaggtgaaagaagggtcataagtaacaaagtttcaaagttgaatgaaccttttttttcctgtaattttactgaccatttccctttctgtttgagagatctgtgcggtcctgttgctgaggttctgtggttcaggggtgttatcggcgacagagtgctgatttcacttgggtctgttctggtttgtcttaatttctcttttagagcttaattttcatttccaacgaattaggcaagacagaaagtgacatttggaaaagagtgaatggatgactaaacattcaccagacgtcattcttgtaacagttaaatggtagtgattcatgtctccatctcttgataaaatataaagcattaaatcttgatggctaaacacactgacaaaactaccgaaccatgttcctggttgaggatacctgaaggtcgacatttatctgggatcttttgctgctgctttggtatgacttctatcaagatagctttcgacgaggtagaacgtttgctttcactctgggttttccttggtttcgacaatttttaagtgttaactgaaggaaatcccgtcttgtcagaatgttcttttcaatacaaatcgcagtgaaataacgggctagaaagatgtggatccttcttgattttaggaagcacacacctatcggcaactctctctgcctggcctgtgttcacggcggtatttttgcctctgtcaccatccttgggactaggtacaaaaataggcttatgttccacgtgtcacccaccacttcacttcctttttaatagatcatgggtaaggaggtgagaggacatgagaaggattggtatgaagtaaataacagttaaatcttttcagccaggggtggtggctcaagcctgtaatcccagcactttgggaggccgaggcgggcggatcacctgaggtcaggagtgcgagaccaccctagccaacgtggtgagaccccgtctctactaaaaaatacaaaaattagccgggcgtggtggtggatgcctgtaatcccagctactcaggaggctgagacaggagaattgcttgaacctgggaggcagaggttgcggtgagccgagatcgcgctattgcactccagcctgggcgacagagtgagactccgtctcaaaaaaaaaaaaaaaaagagttaaatcttttcagatttctaggctggaaatcaacagaacaagatctgctagcagaagttgttacatctcaactaagtatagactggagatgaatctgacaacctgtgacatctttaaatgtcaaacccaccgcacatcacagatgacatcgtacctaatgatcaaactccctttaaaatatacttcatgtaaatacatttttgcgaaaccacaagctgtttctctcagttttgttttcagctggctttgataaggagattggttggcagcctacagctaattaagcagctttcaagccaacatcaatgaaaggttttaggtgactatcagaaatccattccactctccatggtccaccggtgtcgactatgcctttcaattgtgccgacagaccctgtcagaagagaatggtttcgcactaatccaagtttacaaccaaaatcatcctgttttcagtggtgtagatccagtgtctgtatctgtcttgtcaactcacaatagcattagcacagggggctggatttatgctctaagaaatgcaatttacctttctaagctcacttatatatatttgtatctaacatattgtaaatttcttaaacttgttacacatttaattttataactagaaatcaatttttatttatttatttatttatttagtggaaaacagaaaatgaagtgcaagagaccctcatttccggggcaagaattctgagttccttggcttctttcattcttgtctgactttcccccctccagttgcagttatttctagattttggtaaattattcattgcttttaaaagagaaaaagctcgattttctaaatctacagttgagctagccctaacctctaaagccagattgctttaacaaaattgtcatcattttatacatgacagattggcttcaaataaaatggtaaatgggaggaaaagtatattttgcttacacttaggaatgcctgtaaacgtaacagagtttaaaaaaaaatcttggtgttttaacaaatgcatattgtgaaaaagaggaagaaaaaattagctggttgcctgtgaagtaattgtgctaaaaacattcatttttaatatataagagttcacattttaattcatatacttgcaaaagaaaagtgggattttttttcttaaggctttgactatttaaggaaagcttttgtgctgtgccagtctgcttttaagaaattccagagttacagatacaattgagggtgaacttgaatttgttccgtgggcacggccttttctgttgtggtaaaacaaagttaaaatgacaacggttctgaagaaagtgcttcaagaccatgtcctgtttcactctttccagatgactaaaatcaccctcatttcccaagtcttacatcgggggaagaggatatgtggtttaaaagagtggcaagtactagttaaggtcaggctttttctgaatgtgaacattcagttatgctgcatgaagataggggcaggtattgcagagtaaaattctcatacagaaaatgtctgaaagtaacaaattaggtgattaccacggtctccttatccactgtcatctttaatcgtcgtgtttttttttcaaggctgttttgtctgtttttaaatgctgttgtcttatataaatcaggctacttgctttaaagtaccagaagaatcctataatactgaaaaaattgaaatataaaaaagtgaagtaagaattctgagtcacatgttttagatacggtgttaaacaacataacacattatcttgaatggaagatgttattaccttggtgctctcatcagttcagcttgcccagaagcaatgccaacctttcactgagaatcttttaaactgaccacaaatgtccctattcttctcaatgatttaaaatgtcctgtgctaacttttctatcagtcaatatgtatttttcagtgttcttactgagttttgttatttgcttttagttcttttcactgtttatttgctggtttatgttttatgaagaaatccactttcagaagaaatgatgacttattttctgtgggtgtttcctttcttcactactttaagaattttcaagtataaataaattgtgagaatacatatgtgtgcaaggagtgtggggaagagttaactaatttttaaattgaaatgagggaaatactgggctgactctactggtgtttttcagagtgttcctcaatttaacaaagcaaagcactgagtagtatttctttctaatatagatgtttaaaaacatcttccaaagtaagtagcaagaactaatgctcaaagtgttgtctgaaaaatctagaaatatctgcatgctgttatgaacaattctgtttctttatggagagttgtttgggctttttagaaactcattaatttgattgtaagcacctcactgttatcaggaaaagaagctttagaaaatggtttcagaatgtgtcattttctccttgttttaatctgagacagtgtgtgggcatgctggtattttaaaaggctaaaaatgttgtacatattgctgtgtcttcaaatatgagggaagattacaaacagaagttttcttcaagcctctgtctgaaattctgcttttcttctcagtagtgattcttaaatttttacggagagatctttcattcttttttttttcattttcaatctgttgttgaaattcagcaaaacaaatattttaaaagccaagtcagctttctaccgttttgatctgaatatttaatgctttataaaataaaaccctgtgttttaattttaactagtttcattctttttttatgaaatgatttgcggtattagactgtcatttggtttcaatattaatatataacatgaactacgtgggtgtcacttattttcagtagtaaataactgcttaaccgattactttactttaacatagttctactgttctccttgagcctcgtgatctgcatcttcaaacaatatttggtgtgtgtttttgcaaaatagcatttacatactgtgtcattaaaaactagtttcatggtgtcatggtggtcggaatcagggaatgtcgtgtagttggtttcaaaatccatcagtaggttaatcattaattattctttttccaggaaaaaactgatgaggttgtttcagaatttgaatttactagaattccttttttttttttgcattaaaaaaaaacttttgcattttaagcttaaagggggttaatttggtaagaaaaggtaccttttctgtttgtattgtggcttgttcattttctcataaactgtatttggtagctaaaatgttgaaagcagtttgggaacaaaatgtctgctcaaaccatgacaaaattggccacaatttgccgattgggctgataacaaaagccagcaacacaaaataggtagaaaaacagtttgttcggtgatgtgagaccactgaagctcttttttgcatgttttttttttttttttttcattctgatgcttatgttgtgatggaaatacatgaagtctctgcttacccattgtttctgattaactatttcatctttggatttcttttaaaacttcagaaaacaagctgccccctgggcatctgagacaaatttgaaataagagccagctctgcacctaaacattgtgttttctctagaccccacttggttgtaaatgtcccaaaactcttgttttgatcgtttaaagcagcatttaaattccatttcccccaccaccccaatgttcaacattgaattgtatggcttttactacacttttgcaagtgtaaaacaaaaattctagtttgcagtttaaaagaaaagttctccacctgggtatatagttgacaaaaatgtcaacagctaaaagtacatattgactctcatattatcttcgcagactgtaagcaactattaatgttttacatgagacaatacatttttttcaaatgatagaacgagataacagcctcctctcccttgcctctgctgttgtaacttctcataccttgtgttgcctctgtgtgtgtgatggtcttatttttttggtcttaaaaatcagatcctccaggacaataattaggatgaggtttatgtttctacttatctaatctttgttttcacaaataaatacaaataactcaaactgaaacttgatggctttggtgataatataatagcagccacggggaaattttcttcattttaatgttctttcacaacccacattcagtttcggtaggaaaattattaaccttttcaaaagcatgctgaaatatgggttcacaatagactcctgagtatgatttgcaggttttggttctattttgagattttggtgtacagtttttctctttttttctctctttctttcgttcgttcattctctcataccaattgctttctttgacaccaatcgcaatgacttaaaatccttcagttgatatctttttaatgtgtgcacgttatacagtgtttgcatttatttttttattatgagaagggagaattcctatttccttctctcctactgattggttctatgaaagaggacatactctttattctcactgtttttctccactctaatcctcatgtggaggttgtgagtcctccagccccatttaaaaaaatccagttgagccacatttccccgagggcacctggctccatgtcaggcatcagatctgactcctgtctgcctccagtggcctcgtgtctgtgtccatcacaccaaagcaagtccgcccgtttgggcttgctgtcctgaaggtctgcacggcctcaggcttccaaggaaggcctgggtggcggtgtctccatagctgactgctgctggggctgcaggtctggaagggctattggagggaggtgatcatgattttgtaactctggcttcttcacctgaaacacacacgagggcaggacctggggccagagaggcaggtgagtaggaggatctcggataacagtttctgttttaggcatccccttctccaagtctggctgggacagccacacctgcagagagggccctgattggggtcgtggtcctgccccacatctggcaagcctgtgcctcatgtactcacagtcaccttttttatttgatccccatccatcctaagtccccaccccaccgcagtgccctaccctacctgttcccaccgtccctgcaaagttgaatatggaaactgagaaacacatattttatctgtaacaaatgtggacatttccagtattttagcctgggtttttttcttcttcttcttctgcttctcatacttcctgtatgaggttagtttttttaaaatgataaacaaactattttttttttcaacttttttgggaggcctggttgtctagtgcctcctacctgtgttgttgtgagccttttgctggtgctctctacctgggcacagaggtcggtgtgagcagagcctgaaagtgggagtgggggatgtggtgttttgcatagggttgcagtgaggagggttgagctggtgaaaacacttctgttctcctatttgagagagatgcagcagaattcatggctgtcgtgttctgtgcaggcaaaatgagctgaaggatggaaggcaagggggataggagcaggggtggagcatggctagaagagacatttgatgtttagggagagaacactggtgcagattgaatatcccacagtgctcagtcccacgctgtgcagatgagcaacatctggaaaagaagattaagggatgaagcatgccaacatttctccccaggtcaccccaaaaatgagttgaaaattctggatggcttctgagctgcttgctctttccgcccccagtcgggatctcaggagagagcgtccggcaagtagcttgggtacagttgactaagtgtgaacatcagtagccagccgcatagccaacctgcagtcacccatggccctgcatacaagagtgtcactaggagcagatatcacttgccactggtggttgtgtgtatctgaatcacctgggcactgtgaaacacacattcctaggccccagccccagggtttccttcttagaatatgtgaggtgaggccggagaatttgcatttctaacaactctcaggtaatgagatgctgccagtgctgagactcccattgagaactgcagcctagagccagggtgctggaaatgcctaaaaaccgtgtctactggagtctgcaagttgtctccacttttttcctaatgtccctttgtgtgtcctaccacagacttaaaatccacaccagcctctcagaaggccttttgcatttctcagtaactgcacagcaaggttacctgtcatcttggccttttaccatgtccatcagactataaaatggctaaaatgtttttgaggtttggttctctgaaaaatgggttgtattttacagatagtgaaagggtcaagctgtagtgtatggtatcactagactaggaaacaatctaccaagggccaacccttgggttgctgccccttgacaatttccgcctttattataaactaagggagctgtcataggttcttccctatatagagcactcttgacgtaagtgacaccatcttagaaaaagactccatcttacatgtcaaaaggcatcatgccaacagggaacagatggccacctaatcaataaagaccacacccaaccagacagggacatcaccagccctcttctactatcagtccttgccagaggtctcagggctataagaagagcaggatttcaccggcttgagatggtcgtcttaacagagccttgctctgttgttgctcgtgatcagcacctggcatctgctgccaaagactctgcccacatcagagactcttgatgtctgtccggaacaggccaggacactctcatccacgttgctctcattggattggctcattaaccctttcttctatccccttctcactctttttttttcaaagccacacttatgctctgttatcccctttctctcgatgttaaatgttactgttccatgtggaatgtttaatatagcatttatatattgattaagttaaggacactgctgtgtatggtttgcaatattgactgacttgcagagtggcttgagcctgagtgctcacagctctgactaccagttgaacaggacgtactaaggagaatcacttccttgggaactccatgtaacttgtggcttttgtgattgaaatagcatcagtaaaagtctgaccctgtggaaagacacaaatgtgcgtggacctggctatgtctgactttgtgctgctcaggacactctctgtaaccaaaagtgagagagcctggaagacctcagggggtcagatgtttgaaggagctgctgagtatcctggcaggcagcagagcctcaccatcagtttgctgcatggaaggctgtgtgcctctatttccctgctatttgttgaactcccttgagctccggtccttcctaagtgagagagatgataccaatagcaccaacctgagagggctggggagatgtttgaaggaaagcttggctggggagctgtagctggcctgtggtacatgcttggtaactggtggccaggagacccgggtgtgtgtcctgggactgtcacactctgctgacgagggtattgaaagtccccactcaaagacacagaatcttcctgaccaagtgtaggtctgtaatgacgtgtggagcactttgcagaaactgcttctcagcgggggtccccttgaaaaggtgctaagtctgctcagagatacgtggctgaagctctagacgcgggagcctctgtcagagacaagggcagggggactcaagtgctgctgcctggctcccctgccctgacagctctagcagcacacgagtctgatttatacaaagaacccatctcatatctccctaaaattagtctgtgataagcaatatacatttcctgagtgtgcggtctaggttttaatattctgaaaaataaaaacagtggtctcttgagagctgaacagtttggtagttactgagcaggctccatcctccttggcaattcttttgaaatctcaaaaagttggcttcctatactgttagaatctgatgtgagtcaagaatggacaggctgtgagttcctcactcgtcccttttctatgcattgaggaagacctcggtgctgccaatggggcagaggaagctcaagtgtgtttttgcatgaggctggctggaagctctggcttgggctctcagcagtgaggtactggcagttccttggatgtcacagcaaatcgaagctcgtggtcttcacttcctcctaccttgagacttactgcgcagaaagtagaggcttggatggttcaacttcaggggcaaaacagcctgccttgggggtgggactgggggtatgcatctgtgccactgcttctctccctttgtcagtttaccatgccagcagccttctgtctgttatcgggaacagaaagagcacgatttgggagctagctggggagcttcccgaaggttgcctgagctgcatttggggcccctgatgagggcttctattcagggtgatgtgtgtgaccctgaggccatctctcagatctggggggaagtgaggttgtgtacccacagtggggagacctacctggcggctcatcaatattagacacctgcaggaacagcaggtcagccaagccaaagagtaagagtggccctgtctgtgactagacgcttcttcagggttgcctcaacaccggagtggcgctggtggtctccacccactcccagtgtacgctggcgtctaggaagccatgtgtgtgatcggccctgaattaggggcaaaacttttagttctcagatgaactgtcgtgggtttattcagtgataactagacagccaggccaacatggagttgattcatccatgcaaaacctcccagacaaggcctttcagtggagaactggaattcagggtcttctcagctttggccagaagccaaaggtaggagaggtaggagagacccaggtcctggtcccagctgtgtcccatccagagtgaccttgggaaggttgccaacttcctttttcggtgagccttgctttcttcacctgcaaggtgaagggttggttggatgatccgtaagggccggccacctctcactctgtgactttggcccaaggtccacatggttgggtgttccatactgtagccctcctgggctattacattttggtttttcattgcactcaaaagtgggggtaactggtgaggggcacgggttggtaaaccacctctctatttcagtgatgaaactaaagaaaccaggtttccccttccacccctacaggccactgatgcattacttagttcctgtttctctttgcccacccaggaagacactgcgtatgaaatcctgggcccagatgctggactttaagccacattagaaaatgctagctcataggactcaaaacgggaagctggctttcccaacagattcatctgggcagtgttcttcccagaatgtgtaggaatcatggggccaggttcgccaaggctcaggaagctcgatttttcactgtcactagccaatgaggcctttaaggaaaaaacagataagactgtaggagtttatatggatccgttaactcacttgtacaagacattgggaaagatactgggggtgggggggaaacaatacagagtttcaaaagataaatagagactgtcataatcaccacatgtcctggcagccagggctacggggtcaggagaagctttattccctggcctgcagcactgcaagagaccctaggaggaggagagctccgccaggccctgcaggctgggcagcctgcctttggccacatttcctaacaccactcagcagagccctgccagcaaaggtcattgtgcaaaaaatgttatgccccatatatgtttgggaagtgcacaataatttaaacagctttcttatttcttaacttctctgggtattttgtgtgctactgtatcttgtgaatgaatctcaagaggaaggatgaagcttttccaaaatcacatgccttcatctcattttacagaaaaatttgtgcctaatattaaccaaaggaaatggggagcggcagggccagtgggttttcatggtgaactgagggttgcatcttggacaggttgcatgtggaagggacagcagggttcccaaggaagctttgcacggtcatgggtagagccatcccttcttcatccatagtgaatatggctggaaatagcgggtagtcttggatttgacctccctcccatggaagtgctgtctccagctcgctcctggaaaaactgctttctccccaaagtgtgtctgagcagcagatttaagcatgaagttggttttgtggggctacagtatggactttgggaagatggtgccatctgtatttctgattctaccgtccctctgtctgtctttggaagtatcctttcacttgtttgggagactgagaatgattttctgcaaacagtgagccagaccatgctggtctcaagcggcagagcagttattaacagaatcacagtctttctggagctgctgtcagtcctgtgctgtcctcagggcctttgcttggtcaggggccccacttcttatccacccttccctctacctcaccgaggctgctaggcccaggtgtattgtgattatttgatgtacctgggaggccatgtctcccggggaggctcaggacctcattgggctggaattccacagggatctctcattgggtctctttgggcctttggagaggggagtgcagggcaccacctgggcgaacacctgtgccatcctgtaagtccttgtgtgactcttcatccaagtcaacaggggcatgtaggggaagagcctcagggcccatcaggagtcagaccctgaccaggaagtcagaactgaatcaacttttcaataaacacacaggctggccccaaacaaagcagcaggcttttgggaacatctgccttttcagtctcttctgaattctgtttatgtggacaccccatgtcccgcaccaccattgccgccagcaatgtttgttgcttgccaatatttgaatagatgctgataaatttgattctctggcttattgtggcattcatgatatgtctttcccttttcagtttccatgtactagagcgactgtcagtgtggttggcagtgacctgtgtttttcatgcatgtttttgtttcagaataactgggagatgaaacaggaagctctatgacacacttgatcgaatatgacagacaccgaaaatcacgactcagccccctccagcacctctacctgttgcccgccgatcacagccggaatgcagctgaaagattccctggggcctggttccaaccgcccactgtggactctgaggcctctgcatttgcgggtggtctgcctgtgatattttggtcatgggctggtctggtcggtttcccatttgtctggccagtctctatgtgtcttaatcccttgtccttcattaaaagcaaaactaaagaaaacagaattgtttgcttattagctatctttaaacgctgtttgaaaggatatcgaatagtgtttgagggaaccctggcacgtccacacagctcatctgacatgtttaaatgtgtgttgggcttgactctctcataactcagccacgcttgccttgctgcttctcatacctctccagattgctgtagagtcagtgtgggcagactgacatttgagagaaacgtcgggcttcatctggaagcctctttccacacccaccctgatcgtggcctgtaaactgtggccccaagatctccattaaccttgggctttccactagagacatctgccatctctgctgcctccctcccctcacacatcctttactgcttcacttattcatcccataaggatttcttaggggcctgctgtgtgctggttctggagacaaaacagtggatgggaccaactcagccccggtccccacccagcacctctagccaagtctgagtgggctctgctgaagaagtgttgggtgcagtgcacagttcatcatggtcgatggctccatcccatttcacttagatgccccgatttcctaaatgctttcttgaactctgacactctgggactggcacctgaacagtctataaaacggtgaaatgtcgaagcattcctgctgtgtaatcccactctcttccccaacctcaagcaggacaatttgaccccctcctgaggacatggccagacaggccattagtagaagccttccagaactttctggcaatcttcacttttaagcttagcaaacatctaagaataattttaaatggccatgtttactcttttgtacttgttggaattagtttaccaataggccatgatggtgatcacaaaaccccctatgtacatgcacagtgttcattgcaatgcatatccaggtctcaacccaatgtccctttctcaaggagaattccctgagcaccatgtcgtgagagaaccctccttcctccccaccatttctctctatcttgtgattttattttattttattcatagacttatcattatcagcacttatcctgaatgttcaattatcatctgtctgtctctcactccactcccaaaaggcagactgtggtctgtcttatttcccggtctgtccccagcgtttgagatccgagcctcatcaacaactatgtgctgactgggttcatcctcttattacttctcaggcacaccgagatgctgagcagcccagtgctctgaccatgtttggtggataaggaaactgatctgagtctggtgaatggcctcactagggtgaggacccaggctttcctctgggacatcacccagcagaaaagggtgattgtgaactctctactgtctggacagtcaggttctcatcagaaaccaagctttgccctgctgatgaacttcctaaagtttatgtaatttgcccccatcctggaagataaagaccactgtgttgtggagggaaatagcctcagctgggcgtctctggatgctactttctccagcagaacactaagaagatcagatgagatgaacacaaagattccaccctgccctgagtttctgctggttctacctggctaggttctagcagaagagaaggaagtatacaagggtaacatgtgcaagggccgtgtacaagggtaacatgggcatcagggacagtcctcctgaggatgtgaggagccaggcccaactgtgggctggcaacctgccccaggggttgctcacactcacctaactccggcccctctggacacaccccttgcccaggtgcaaggggctccactgggaagaacatctccacccaagtgatcactcttcctctgcgtttttgagcaggatgaaaccacattctctacccatttcgcagtcttacccccaggattatttatgacctcaaaaagatggaagtcacaggtgcagggaggaccagacgtaacccatatgatgcctgcaggatagttagttcacaaggatattaggagaaagagcaaaagagaagtgaccacacaattctagatggttaaggcaatagttctgaccctggccagacattagaattacccagaggttataaaaaatccagacacccaggatccacttggaccaatcacatcagaatctggggattgagggggtgtagacatcagtattttttacaactctgcaggtaatttcaatgcatagccaagactgagaaacattggtctctcaacgtaccatccaatgtggtagctgttagccacagatatctatggaacctttaaaatgtggcttgtacaaccaagggactgaatttttaaattcctttttattttaaatttaaatatccacatgtgacttgtggctgccatattggactgtgcaggtacagaacatgtctacggtcacaggaagttctactggctagtgtggtccaggggaacctggagtcctataactgccgagtgaaatcctgctgatcctgaagggactttaaggtaattctgtctgttaacttcactaacaagccctcctgtcttgggtttgctgtatatttttcatctatgtttcaagccagggcttgtgcagcagcaagggtgacaaactttcaaagcactgcactgtaggattgaaaagcattgaaaatacagttatgcactcactaatgtctcagtcaacaatggactgcatatacaatagtggtcccataagattataatggagctgaaaaattcctatcacctagtgatgttgcaactgtcataatgttgtagcacaatgcattatcttttctgtgtgaagacatgtttagatgcacatattcttaccgttgtgttacaattgcctacagtatttagtgcactgaaatgccgtacaagtgtgtagcctagaagcaataggccataccatatagcctaggcaggtagtaggctatgccatctaggattgtgtaagtataccctgtgatattcgcatcacaaagaaattgcctaacgatgcatttctcagactgtatccctctcattagcaatgcatgattgtatctgtaaaaatctaaggcccagacctcagtcttttggtgttcattctgctggtttactcagtttgcatcgttgaagacccagtcctagaaaggagctttctaaattattgtttaattagtgtaatccaagaatttatgagacttttggaaaagcagagcgctagaagtgccacctttcggaggtcacggatttagtcaggtgacccagcaaactccactcgttggggttagagatggagaattagaaccaaagctgaatcactttctgcttatcactcatagactgccagattttcttttttttgttggagggaaagcaccttacaacaaataataatactattttgaatttcagagctttccctttttcaaagcactttaccacctatgacttattttgtcctcctaacaaggccataagataaggaagggagggctttttagagcctgtctaacaccctaagacagagcttaatattgctgaaggcattgaaaagtataggttttgttctctcatccctggccacactcaagtacttagtggcacaacttgaagcaaattgacatagatgtttaatcctacagtggactgtgtttttaatagacactagagcttcacatttgttccctttggttccatcccaggtttctaaccttgtgcctaaatttttgggggccctttcttcctcagagctttgtgtgatctgcaaatttggtaaatatgccttcatttaccatgtctctttccaaggtgggtttcaccatgttggccaggatggtcttgatctcttgacctcgtgatccacccgcctcagcctcccaaagtgctaggattataggcgtgagccaccgcacccaacctccaaggtgttttttaaatggtgaatgggacagaacgcaggacagagtcccatggctctccatgaagaaagtcctgtgtcacttcaaaggatgtcccctgtgcagaaccaaccacgctaggctgacatcctcacttttgggtccccaaccttctcatgggtagagctgcagagagtcatttcaaaccacacttgcctgtgggcagaaagcacggaattgtctgtccaactagggactcaggagcagcctggctgtctgcagcagctgcaaagggagcaaaggcaagcaggacttccatgagctaggaggtggccttctttggagatgagtgtcctgccaattgcaagtcctcctggtcacaccatcatctggcccatcttttgtatcttagatcggatagggtgagaggttttcaaaggctttactgaaatcaagacacactttctggggcattcccctaatcgactgttctggtgaagctcgtcaaaacaggaaatgaggttagcatggagtgactttctcttagagaacttatgttgcttccttgagaccaccaatttcttcccaaaagcttgtgagccttatttcgtgtctcttttgggttttcttggaacttggaggaagtctgttcttctgtagtttttagaatccattcctctggaaaatggtggtggtgtttgcttattcccagctttccagactctctccctttttctccagtatctctaagatgtttgcaagtttgtctgaagtgagatctgcacatacttgaactacagcaagaatgggattgacccacatgctctgtgcccacgaccaggctgacagggccgcatgtgggctctctggcatgggctttaggcagctccttcccctgagaagctgttggatccacatgttctcacggtatcaaaaatggcaggaagagaaaactaacctggtggagatgaaacttagtgggaacactccgctttcctcccctgctccgtgtgtgagcacttggctcagaaatgcactgtggctgagacagccctatctggcttcacctaagcctacccccgtgttgagttctttaacttagttatcaaagcggcaagggtttcagatctagacaagctgcatcatgcttatttttgctgaggttttctgacaaatggctctacttgaaatttccagatttaaatgtctgttttattaaaactaaagtacttttgagtcatatttgcttttatgtagtagaagcaagtagaagagagtccatgggaaggaatagctggctttgcctcacaggtgtttagggaggactgctgtctccaatgcaagacctggattaccgtttagagatccacctacccctcatgatgctcttgttgctggaatcatggtctgtttcatgctttacgtgacttagcaggaccttgaaagctgtcctgagtgcccatgctggaatggggtagatttcagttccctctccctcactcccgcatgaacctcagcctcactctactcaggtctagggtacttagtgtgttcagtgatgattgtctacatagatggattaatacatatgcacctttataatcatcccagctaccatctaaggttctagctttctctggagacatttttggtggtttacaatgttattttccagtgcgcatagcaggccccagaggcaaggtgatcacccctttgtttcagttaagaaaactgagttttagtgaggacaatcaatttttcccatatcacaaaactggtcatgtgatgctgcatcccatatttaagtccagagcagtgagcttctccctatccctctattatgctgccattttgtattttgtaggtgtgtaaaatcaaatgtcattcttccttaaaaaggactgtgaatggtaagcaacagttgggaagggtgacaccagacaatggctgaaaacagggcgactggaagttgactgatgggtgctgagcacttggcatcccttcctgctgcagaccccactggaatctcctcagaaggggacactggtggcttccattggccctgcctcccgccagggctgtgtgaggatccacatgggctgggatgagggtggatgttgttctctgaaaactgtccactactcaaaagtgatgttgtggccgggcacggtggctcacaactataatcccagcactttgggaggctgaggccggtggatcacgaggtcaggagttcaagaccagcctggccaacatggtgaaaccctgtctctactaaagatacaaaaaattagccaggcgtggtggtgtgtgcctgtaatcccagctacttgggaggctaaggcaggagaatcacttgaacccaggaggtggaggttgcagtgagccgagattatgccattgcactccagcctgggtgacaggggagactccatctcaaaaaaatttaaataaataaataaataaatagatgttgctgggtcaaaaagggagaggccccaccctggccccctagcaccagaatctgcatttcagcaagatcccagggggctgtcacagttgctagctctgctctttatgcttgcctcagctaggtgctgagtacctgctagaggtgtgaattcggtctttattcttcagaggcactggtcagagggtggaaacatcagacagggactcctgggcccccaggcaggactccatggggatggagcgggggatggaacatttgagaatcaccaacatgcagcaaggacattagtgagaaatgagttccacctgccagaagggaagctgagaagggaatgcacaaatcaggaaaatataccatcaaaaactacgactcttctacctccagccctcgccaccaattcctatcccattattttatatccgagagggttgataggcagcagacacactgattctgtaagcattgtccctagtccctgtaggcgaggtgaccatgtacccaagttcactcaaggtggtcctgtccatgcctattagaaatgagttcataattcctttcagctccgcctttcactctcgagcgtgcccttgcttgacgattcctatctggcttggataccctcacttatattaccttatatctgctattatatttccccaagaagttgctttacaaacactgactcctcaacacacggtcatctctaaaagaaagggtgtttggcagttcctcgacagttctggaaaggctgccttactagaagcagagtcagccatgggggggtgagaacgaaagtgtgcactcaagcatgtgtgtttggggtgtgtgggtatgggtgtgagacatggtcttatgggttctgtgtacctgcatgtgtgacacaggtgtgggtgcagaagaggacacggggtgtctggtgcatgggtgcctgtatgcacgtggggtggttgcgtgcatctgtgagtgcacatctatggtatgtgtgtatgcttgtgcatacatgcctgtgtgtttgcatgtgtggtgtggtatggtgtgcgggaatgcatgggcggatataagtgtgggtgtcttagtggatgtgtgcatggatgtagtatgtgatgtggctggatgtgggtatgacgtgtgcagtatgagagtagggttctgtagcacgtgtgtgtatgcagtatgtatgtttgtggtacatgtgcattgtgtgtggctgggggtgggttgcatatgttgcatatggagtgaggtgtttgtgatgtgtgtgggtgtgtgcggtgggtatatgctggtacctgtgtgcatgtgtgttggtgtgtggagtggctataggtgacatgtgatgccatgtgtgcttcctgagcttgtttgtggttgttcccagacccactgcagactcaagcatggctccacatggcaccaccacaggataagcctctgtgtgtatgcagtatgtatgtttgtggtatgtctgtgccttgggagctggtggggaggagggtctcacccttgtctgtccctgggcatccactatggctgcactgggaagccactgggtgcaatggtgttgctgtgtgggacggggcctcaggcccacaggcagcaagcatagaccagatccacccagcaccctgactgttgaggatgggccctggctgtgtctctctagcccagctagctcctactgcatagtcaggctttgggaggcaggaatctctgaatggatttccttcctcctgccctgcttggataggggcacttgtggatgcttctggctccaacttttgtgtgcagtgactatgatggagaagcaatgagctccctctacagccttctgggctgctggcatccccagtatgtttctccctggagacactctcagtgaggccaattccaggctgctgggggcttttccttctgtcactgtcgggcctccgcagggatctgcctggctgcaagatgctgatgggtggaggggtggcccacctggcctccagaagcaggagctccctgcccactgcccgcatggccctcagccctggccctcacctgttgcccctctggaagaacgttgctcttgttagctaacaaccacctgactttcctcgatctgtctctccctgaggcaagaatgacctaggtctgaagactgaagaccagtgctggggcccctcttggaaggccaaggaagtggagaagtgcccaggtctggtctgcttagcctcctgctagttgttggagctctttgagccttggtttccaaagccataaactgggagaatgacacctaccccagcagcacagagggatctttgcaataatgtgcaaacccactcagcatgatgcgtggcacaaagcacaaacccaataaatggtggctattatcactattattttatttcatagattcaaatattgagaatgaaataaatatatcagaaagtagtagcatcgtgccatcagaaaaatactctgatggggtcctagcgatcttatccatgaaaataaaatatcaaaagaaagacaagacgatctagaaagaagggatgccggcagtcttagaaaaaacaaataaacaaaaacaaacaaacaacaaaaaacaaaactggtggcagagagtgagacaacaggagcaaatatagggccagccagacaggcactgcttcctctccctttgacaggcaggacagcggcccgctcccaaatctgcagggtcagacgtggtagatgaacagtgatttgcctgagtgtaaatattgtgatgtctttcttttcttgaacttttaaccttgctggtaaacagggtgcatccagaattgtttttctgagaactgagttttgaggaaataggggggaaaagggtttttattagctaattttcagtcttgtgcgtgactcaaaaccttcttattctgtttcttaactttgcttcaggagacacttggccaaaaaatagctttgtttttaattgatgaaagaaaaatcattacaatgtgtaagtatgccaattcaaacatggcaaaactttcaaagacaaagcaggggtggggaggtcattctgaagaagatttctgagacaagaaaaacaaccaatccaaatccccatttgtgttttctaatgagaaactcctcacacgccattgccctgctgaccccggtcttaccttgaccacctcgccccatcttcatctgttataacttctgagatattgtaatggaagtatagagtaagcctgagatacactctcagcattcaaggtgctgccttcctttctccaggcaggaggctgacacagccgcctttatttacaaatgccgtaaattgactgcaggatcctttcgtgagaaaggagaataacggcagggaaccatcccagcaaaatgaagttctgggctccaccgccagcttttccctcgaaggtcatatttcacctctgccctgtaatttcatgaattgttcaatgaagatgtgacttattggcttccaagcttcatggaggtgttgtccaaatacaaggtccataaagtgctttggaaggcttggaggaacaaagaaacactcttgatctgaggttgtgatggagtctcctcaacattgtagccgatgatggcgagtgctggagggttcatcagacctgacagcaaccccagccttcaaaccactctctcccctcactattcatacctgcatttgtgtctgttcagttgaatgctggcagaccgtctttcaaataatgctccagttggaaagtaaactgagtacattgagaataaatatctccagtcttctaagctatacggcagtgttgctgggacctgtaagaaagtttctctctgccatcttagaagaaggaggaagaggagaaggaagcaggaaaatggaacaaattgccgtacctttgtaaaagatgagattgaaataaatcacaaagagtgttaaaacaggcagcttgcgggaagccaattgctaacattctcaggccccatcctttcctcctcctcttcctttcagaataaattaaagaatgggcccaagtccaagttgtgtgtatggtatctttatctgattgacctcgtactcctaataatatcttatcttcgcttgtaaatcattagcacccttttccgttctcccggcatgttacttctttaaatgtgatgaacactcacaggagtccgctctgcagacagacaaagctactgcaaggatcctctgtcattcatttggcgatttggtcccgaaggcctcagctggctttactagcaaagtgtttcacaaattcccatagccctgcaaacagccactcccccaaagcaaacaacctgagacatcaggtaaacactgaagaatggaaatttcattcattttcctgcctgcatcctctctagttgacagagaatgtcagtcaatgcaagatttgttgagagtggtacatttgaggatttatttgtaggctgtgttaatatactttcgagaaattcagttgtatctaattaatgcttttttccctttgattcattccaaactatttaaattggaaaattgtgtgctatttgaagatgcacttcaaaactccttttgttgtcatggtgcctgttgtcactgctttttgttggttggttcttgtttctatagggcccctcctctttgggatcgtgtgggtacagatgagactcacagttccctagccagatgatctatagaagtttttcaaagactgcataggtagtgttactgaacatagttcatatgtggtgtgtgtttctaaccttgcaagctccttgcaaaactacataaatacttgtatttaagttgtgctgtgcatatgaacataccttattatgagaaaggtagattttaaagtattccttccatgggtaaataagtcttccctgatgataaatcattacagttgctttcacctcccaaactcctttagctctcctctcccattcagcccctgtagaaaagggctccctttatttactgccccacttgttgcaagttgggggctatttctttaagtctaacttaatattccttgtatttagttcaaactgaaaaattctcatgtgtaaccgccgggcagggcagagggaagtagtgtctactttaaatctgttgcagcacatgaacttaaatgacaaaacaaacacagaagactgaaaagtcagagaccctcttaaagaaaagcttacaaaattatagtgtccactctaggcaggactttcatatcctttatctaactgtcacatgatggggtgacatgttgatccccccacagcctggatgatagaaatatttgtggtttgatatgcgtcagcgcttatgactttggcataaaatacaatctcctttgtttcttccccaaattcaagaagtgcatctttccataatattgagaatagaacctaacatttattgaaaatctactagcatattttgtctttaaaaaaaaaaaaaagcacttccacatactcagcaatggcccagtgaggcagataatagcttcatcccatctcacaatggtgaaataaagatcagagggagccagtaacttacccaaaatgactcccttaggaggtggcagagcccatactcaaagtcagtttgtttaaccaaactgcttaaaatgtcaacttagtttgcaaaacagccctatgtggttggtggtattatctgcaattcatcaccaacacactaggcccagggcaaagctaaaagcaaagctaaaaacaaagctaacagccagagtgaccagaactgggtctcacctctgctacacctgtgccagggagaggagatgaacactctaaagtgctttcatgcacttgggggccttcctgtccaagtgcagtataaatgttctttgtgccacatcttaaaggaatcctcttacagaaagggcttcccatctgagtggcaagacccaaggctaggctgatgcctcttcctttgctatgtgagacctgaaggcaaagtctgcctggactgacagagatggatgtggcctccatctgtctgtgtgtcatgacagaaaggaggtgggaaaacttggaaaatgggaaccctcactttcctgaaattcccagcaatcagttccaagaattgtaaccttgaagcacaggaaagcaagaccctcagccgggaacatgaaagcttttgtcgggaattctttgaggtcctgatgaggtgacacagtgaccagatgttccagattcaacatcaaggccggtgggggtggcactgcaccggtcacgtcaggaagagcagtgtagtcagagagcgtggcaaccaccattcgcctggtagacagctcattccatctgccttgcatattttccgctgagctcagaatggagaagatcgaatacagtctgctcttatcaccctgaagacttttaaaaaggctctgcatactcacacaaaaatcgggaacttgatcactgtggcctgacaatgtgttttgaaaaggcgggggttgggggcggtcagtctttccctgaaagttcccatccattgttgagtaaacatcataaatctatcgcagagagacaggctgcctgtactcaaattaccgcctgctacaattttagcttcaagttttaatgccctaaacatgaataacgtcgtatcccagcacaggtctgattaatgaggcaactttgccaacttcagggtcggagagtggctccccacctccttccttttttccccctgtggcttagtaaccatttcagcaaatttcctcattaaatatacaaggcgactgagtgcaataaaaactaaaggatgtggcagataaacaccagcgtctctctgagcagacctcgctgcccaacagagcaggccagctcaggtttgctgggaggaatccagaatgttccatcatgaattccagcataaaaatcatgcacgcattgccctttgccatgggtcattttcagtctgtgggttacacttacaggaccgtctgctttccgagctgtcacatggtttatacatggaatgccactcatgccctacttgcacgtaaggtgaccaatggctggctgaaggtcacactcaggagatgacccaaattagcacgtaatgtccaaccttgaaaggaaagagggaagttttatcttgcccagatattgtctgttccccaaataagattgtgtgtcgcttgagtaattcccgaataggagcccgtttgttgagcacttaatgcaccctgggcactgaagaagaaatgcggaggagtccccaggacttgctgagtctcctagagacagcagaggtgctctgctcacaggagctcattttctgcccacaacaaccctgtgccatcagctacattatctccaggtttctcatacaaccaaagctgaggcttatagggtggcacaacttcccctgctctggctccgaattcaatattcctaagccataaagcatttctctttcctccccatcctgttcccattcccagtctctccatgaacacacacacacacacacacacacacacacacccttgtctacacttgagctgtagtctgggcccgttacatcaacaacacaaccacggcagaacgtggattggtccaaattgcagagattttaaatctaaatttcccatgctattgagactttacagaaccagtccttcaggtgagttttgattttctgtttaagccagggttcagcaaacattttttctaaagaccagagagtaaacattttaggctttgctgggctgcatggtctctatcacaatggctcaactctgccattgtagcatgaagcagccaccggtaatacatagaggaatggcagaaggtgtgttttaatacaactttatttttaaaaacaggcagagggccagatttggcctacgggccatagtttgagaccccatagtttgagatctaagtcatcactaaaagtgttatcagtaattgagggttttagacattgcatctgtctaacctatcagaagtaagattgggggccagggccattgcagtgaggctgtggaagttcacagctgcttaagaagcactgtgaccaacatcgctccttaccccagatgggccaggccagcagtcacaacatgtgctccatggggagacagcaataggcatttcgctagaaaagaattctctggactagtaagtttagaaaaccttgggctattattatcgttattattatattattccatgactgcaggacttctcagggctttcataatgctgatgaacatgaatcttcctagatattctggatctctaggaagggaaggtttgtgtgcagagcatgtctgcacgatattctttgggaagactgcgctggctcccgtcctagagattctcatgctgtcttttctttctacctgttttcccaactgttcccacttgagagtactggcctgagttgctgccaaccttacaatatccagctccgtcctcagagccacactgcggtcccactggggactttggtggccctgcctccctgcaaccccaggtactcagtttggagggtgtggagagggcagggttgaaatgcaggctgctgtgtctctttccttcaattttatcaccagctgctgaccatgcttgcttaaaggtctggtatttatggtctcctagaatctcccagaacctcacaaatacccccgggctcctggtttgagggactagatgggaagcccccctccctgggagaacacaggcctagagcttcctggaacttaggcagcttggtcagagagtgtgaggactctgacaggagcacgggtgtgggacattcatgcctggaaggccctcgacacctgagacctcggtgtggaggcgggacttggaggaaaggagtccctgctatagtggaaaaaccagccagggtaggtagttttgtataagactcttaactctgtggagacttctgttcattatctgcaaaatagaaatgtgtatcccagcagcctaggcttagattgtggaggactagctgaggggtgtgtgagaaagttttgcaaacatggctgggcacagaaggctgagctattgtctggaggaaaactctcagggcaattcagacctttctgggcccttctgaggcaagaggcattgaggcaaagtttgagatttgacttcagggacactgttctctaagcatatgcttcagtcacgagcgctgaacccactctcaaaagctaagtagtagcaatgaaatgcttaaaaagttcgacccagactgcaaagacccacagaaaatagagcacagtggctggcttggggagggaccctcggtccagacagcagccaaggagttcttgagccttatttatcacgttgtagtattttacaaggagggctatgcattatttctctaattgaacgttacttttaaaaacagacaaagagaatcaggaaaaatgatgtgaggactttaggcccagatcagtttccgtttcaacaagatgtgtcaggatgatgaaaatgtcgtttggttgagccgtggtcatcaccccgcattgttgttctttcatgtgtttgtgtgtgtgtgtgtgtgtgtgtgtatgtgtttccctctgagtttcccagtagtcattactaaaaaaaaactcctaaactgactcaaaacaacaatgacaaaaacaaaagcaaacaaaaagacccaatcaccacaggcgccattcaggccctcttgtctgacggtgttcacagactgtgcttgtgtttttggatgtacccgcttccttttctctcttactcaccagatatcactgggaatccctccttcttgctccaggaccctaaaggagacactggggtaagactcatgtgggtcttggggcagcccatttccaggagagcatgacccccaccccccaagccccaggaggacggacccttcccagctgaggtctcctctgcatccggaccagggccctgggcctgaagccaggttttagtgaaggccttttgtgggtgcctctcttgcccaggaaacacaaggtctttaagctaagcctgtttgtggggagagcaacccatttcttagagggactcaatccatagggaggacactagtccatcagggggcccttgtattttcatcctggaaagcacagtcccctgtttccttctgggacatgagaagttgcttctaatggttcatccccacaacctcacttccccatccttgatttgcaaatgggtccatagagaggtcccaggcagctacttgacccaggcagcgaaggtgagcgtgggtctcctcactgccatgagccaggcagaagagcaagcaaaacagctaagaaccagacaggccagagttcaggttgcagctctgaacctgactaagctgtgtgacccaaggcaactcacccaacctctctgagcctcagtttccccacttaaagtggaaacaagaccagcccctgcctcatggaattgtcatgaggaagagtgaagtggtgctcgtgcagagctggtgcccagggaaggggctccggtgccaggcctgacagctcgtcagggaagcctgctgccggccatcccagggagacagtgccagatcagagggaagctcagcaagccacttaaaagggaccttgactcattttgtggtaaccgaatgtgcagttcaggaagtgcttcgcaaaagcgaactgggctccagccgccccctcgtccccctgccctctgctcaggattcactgtgcgaggacccacctgacaccacctgatgcataccagcagcgtggatggcaggccccacgtgttctcaagcccaccaaaggctggtgggtgtcggctctcggaaagacagcctgacctcctggactgaaattccactcctctctttagtcgaggtgctcaatctccctgagcctctgtttcctcctctgtaactggcactaccgcatactagggccggtgcaaagcccttggcaactaggtatcatttaatccccacaagcagctctaaaggcaagtacgaaaccttgccatttaaggatggggaagctgagggcaccttgagttatgcaagggcacacgcagggtgagtcttggagctggaatttgaacctggggaatggcactcctgggccttccctcctaactcatagtatctacaacctggattgtagacctagctagtaggtcttgggggttcttccctcctaacccctggtatctagaacctggatcgtaaacctagctagtaggtcttggtggttcctcacatggatggaagagatgccaatttccattaaccatgcacactgctgcttggtgggcaggtgaggaagtggtctgagtgtggaggaagcccaggacaggaccctctttgcctccccgtgggatgtcctggctgccctgggaggatatgtgtggtgttctctacacccacctgaacctctagctccccagagcctctgactgcatgttctgagggcagtggcatcgggaacgcatgggcgcagtgtgcagagactggccgaggagagctgtaggggttacctattaaggaggcaggtcccagcaggtactagggactgaagagggtggagggagacccgaggggggaagaggctgccctcgtcattagcccagatccatcccacccacttcttcccatctccctgtacttgccccatagggattcccaaagagagggaagtagagggggagaggagtacatggacacaggagagcgagtgagcaccccaccccacaacagtgtcctgaggaaggcccctcttttgtcccctgcttcacaagccttgggaacggggaactctgcaggctgagcggcatccctgctgggaaatgagggcctgtcttagttcctcatttaaggcacccaccctcattcccaaggcagttaaaagccccaagttgcccaactcggtcagaggaagcctgtcccatcagtctcacacacccagaacttgattctctggcctccgagactgggcagggaccagctctgtgtccccgagcccacatgtagaggagggagccgcgaagctgatagcccaggaacatctattccccacttgtcattgtcaaactctgatgtcttctgggactaaatttgaaggacagtttttactgttgtaaccaaaaaagcaaaaggaagcaaacaattaacaggcccccttcttttcgggacttttttctttgtcagtagaaagccatctcagtaaacaagagctgttacgaaatgtacctcaccccacactatgcctgtaaagcatctcccttccccccgctgcacaacccattgtacaagaaatattgtgatagatacctttgggttgaggctggaacaaaatgagccatcaggaagcattccattttcagctggacttgtttctgcatcttttggaggatttctgcaaacccacagcccagtatggcatttcccatactctgtgataagaacctccaggataacgttggtggctcagggatcatctgagccttgagcagcttccattctgatctggatgtctctgatgtgtgcttgttcaagcaatcgatgagccagtcatgggccccagactcatgggaactgggggagtgcccaagtcaaccctgcttgcttttacagctttcctataaaagcttctccactctttgcctgggcaagcccatgcccagatctccagcacacactccagctgccagagggggtgggggggctccctcctgcgtctggaacctattcagccagcctgagattcagaagggcctacctgctggagctgagggtgggtgaacccacccacttggggctagcgaaagattgcatcttgtcccaaggctctgctggacctcggaggattcccaccattgtctttttgggatttgagggaggtgtttcagactgggagactgggagaatgtttcccagcaaaaggcagaggttggggttcctgggatgtggctccccacagaccaggaggctgacacagttcctctctctgtcttcctgcttttctcatgcaaacagcacccctttcccatggctgctctaacatccttggtagcttaacacaaaacacaaatgtattctctcacagttcccaaaggccagaagcctgaaatctgtttcaatgggctaaagtcaaggtttcggcagggctttggggagatcagcttccttgtctgttccggcttttagacatggccaacgttccttggcttgtggacccctcctccacttaaagtccatcactccagtgtctgccccatcgtcacatggctatcccttctttaaccttcttgcctccttcatataaggaccccagtggttacgttaagggcccactcagataatccaggactacctctctatctcaagatcttcaacttaatcacatctgcaaagtcccttttgccgtgtaaggtaacattctcaggttccagggatttgtggatgtctttgggagccattattcagactcagatagttatagttaagacctatgagacagtcttctacatccctgagtgatacttgaagcagcctagcaacaaaaaaagccacaaaactttgtcaggagagctgtttttggggccaccccacattgacccttacctctgcagcccctggtttcctctggcccctgcacttgtgtgataccttgagaaggggtggatccacatgccagcctacgcaggagcaagaggaccagtgctgcctctcctttcttggtacatgccagcatggtctgtggctgggatgctgctctctgagacttgggagcttacttgttcacctcagcaatgaactctgaccacattttgccattcctattctcaggcccctagcaatctcattcccaaactcgatgacccagtcttttgcatggctcagagaactgccagaactgttagcacctaggccctctgctggagttcacagatgcaaattctgttgcttgcactccaaatctgtgatgcaggattgtctgctatgtggaattaattcaggacttgaggaatccttgtagtgccaccttacaaatgggttggtgccttggaaacccagtcctggcatcaaggccttggcatctgtcaagcagaagtgtgcctggggtgtattggggggggggcagtgttggagccgatttcaccgatttctgtccctggctctctattgtgcaacaacaggctcttctattccttaagacggcagcattattgccaggtccttctatttgctcataaaactcccatttacacagcagtttgcaggacacatcaaatacaaaaatggatgtgaggtttagtacagggagaccacagccataatgaatcctggcagggtttttattttggttgcatctcagaagcactttgccaagcaatgtatatgtgttgaatgaatgaatgaataaatgaatgaatgaatgccggtggactgacatggccgtatagaactgtagtcacccttcagagagaagcctctgcaatgcacctgaaaagcaatgaccatctacatgttcttccttttcttgttactatgttttaccccaccaggatgcccactgaccagaaactaaacaaaaaaactcatgttcctgaattcatcttttacttgagggtaaaagcttggggtagtgaagtgaatgttggtgccatatcatgttcaagcattttggaattatatagctctaatttagacaacagcaacaacaaagaaaagagactccatcatcagaattgataggttagtaaatttacagatcactcaaagatgttaaaacaaaaaaacaaaaaactttctaaactctcggtgttcttgggaagtagcctgctgtcgttgggctagagataccaagaagagccaaggcagcagattgtggttgaaatttaacacggtgtgggggtggtaggctggcggcacaggggctgctgtcagagataacacacagcccggagaaccagggtgtagatcagtgcatcagagccctttccaacggtcaggagaggaggcagctgccctgggggcagggaggacctctgacccacaagtcctgacctactggcaggagaaccattcctggtttgcttgctgggtctgagacatttctggagatgtgggactttcagtgttaacacccaaatagccctggggaaactaggatggttgctcacccaagctccaacttgtctatagaattatctggctttgaaagaatgtcacgtgcttttatcttgaatctaaggtcactggcatgcccctctcatccactggttattcttgatggtaagggggcggggtgggtagggtgaggggagggtgaaggggaggttcctcctgccattccttcctggagaagagaccagggcctttccaggattttggactctgacatggaaggaaaacacttaaagaccttcaggatttcgtgagaataacaagattttattttaaccataaattgtaatatttgagaaaatgcagacatattgtttctcagagcccatactaagtcagtgtggaaaacagcctttctctggaggcaaaattgcactgattaacttgaattacaaagggagcattgcttaccttaagctaagacagctcaatgagacctgctgtagcatttttattacatgtgcaattgtgcacatgtaccctagaacttaaaagtattataataataataataggaacctgaaaatctagacgtggagtgcttgcggtctctggacactcaggtctctcctcttacctcctttcacctcctctcagagcccatcgctgacatttagttcctctagaaacacaagcatagctcagctgcatgtcagaagtgcaaaaatatttaactttaatttttttatgtatatgtctaaacttgtcttacacttaaggtccctgtattagtctgttttcacactgctaataaagacatacctgagaatgggtaatttataaaggataggggtttattggactcacagttccacatggctggggaggcctcacaatcatggcagaagacgaaggaagagcaaagggacttcttacatggcagcaggcaagaggcatgtacaggggaactccccttcataaaaccatcagatctcatgagacttattcactactacaagaatgccatggtgaaaacctgcccccaagattcagttacctcccactgggtccctcctatgacacatggggattatcacaattcaaggtgagatttgggtggggacacagaaccaaaccatatcagcccctttctattggtggcaacaaaatatttcattttactaactaaagattagtaatctctactgtattaaaacttacgttcattaaggttctaagtttctgatgccactcaaggattccccactcccctcctttcccaaaatgcagcccaggtgccaggagaagtgggtgtgtgtgccctgtggcatctggggagaaggggctggcctcccaaggaagaagagcttctccctcctggtctttaggtgccaccctcatggggtccctgcctaggtgtctatggctggggttgctcatgacctgttctcaccacaggcacagcattaaggtccgaggtgacttgtatgtgtccccagattggctgagaagtaattcattgtatgattatagcacagtttgtttagtcattcacctgctgatggccatttgggctatttccaattttgtagtacagtagtccccctcctatccacaggataggttccaagactccccagtagatgcctaaaactgtggacagtactgacccctatatacactgactgtggatagtattgacactatccgtggatttgataactgagagggctactaagtgacaaatgggtgggaagtgtatatggcgtggagacactggaaagagggagtatcactgtccctggtggaataaaacaggacatcacgagatttcatcatgatactgagaagaaggcacaatttaaaacttatgaattgtttacttctggaattttccatttaataattttggaccatgattaaccacaggtagcaaaaaccatggaaaacaaaactgtggaaaagcagggactactgtatcatgaataaagctggtaagaacaagtacaggtcattttgtggacaagtgtttttacttctctttggaaagtagaagtattgctaaaccatacataagtggatgtttaatgtataagtaactactaaataattttccaaagtggcgtatgttcccactaacaaagtatgagaattgcttcatgtcctcaccaacagtttgtgtctttaatctctataatttgagctgttctagtacatgggaaacggcatttagttctggttttaatttgcatttccccaattactcattatgttgactacctttgcaagtgcttattgaccatttgcaaagtgtctgttttaggccttttattagacctatctctaggctgttccaggcctatttttatatttggccatgtattttttattatggatttatagaaattcttcatgtatacttgatataagtcctttgccaaataaatatattgtgaatattttctcctagtctttggcttatctctttttcattttctttctttcaaagagaagaatttcatgaaaataaatttattactaaaataaatgtataattaatgtatgagtagtgttttttgtatcctaagaaatctttgcctaacccaaggtagcagagatcgtttatgctttcttccacaagttttatagttttaggcttttatttttaagtctatattgataaacctaaaagtgtgttacttaatttttgcatgaaaatttttaagatattatatggttgttgatttctaatacccacttagttagagaatacactttgcataacatgacatagacaacagggataagcaatgggcaattattttttaaagaaattagagaaagacaaagagagtagtcttttatggttacacacatattttacctatccatggttgttaacatcttggtatctgctttccattctcaatacccaagtttccatctgatgtcatttctcttcaacctgaagaactttctttcatatatcctggtgatgaattctctcagcttcacttaactgaaaatgtctatattaccttcattttttgaatgatatattttactggacatagaatttcagcatttattatttcgttaccacaaaattttgtcatctctgacctcattgcttctgataaaaaaaccgatatgatttatatcattggccccacacaggtaatgtgcctctggctgctcaagatttttctctttctcttaatttttcaacagtttgactgtgttgtgcatgtgtgtgtgagtgtgtgtgtgccctctgtgtgtgtgtgttcatcttctttggagtgttttgagatccttgggtttataagttagtgcttttcatcaaatataagacattttcaattacattttctctctattcctcttctgaaattataattacacatatgttaaactatgtgatattatgccagatgtcgctgatactcttttattaaaaaatattttctatatgttcttaagattggatagcgtatattgagctctctgccagttcactgaccttttcttctgttgcctccaatctaatgttaggcttatccactgaaattttcatttctgagttctagaagctctatttgtttttgttttttgttttaccccaagttgttgctattttcttctctgattttctatctgttccttcattattaaaatattttcctttatgtccttgaacatatttataatagctactcaaaaattcttgtctactaattccaacacctagagtaccttggagtttgttgctattaactttttttttctttcgagtatgagtcacttttttctgtttctttgcatgtttataagtttttattatatactgtgttttgtggataatagatttagagattctggattctattgttttcctttggcaacatcaatcagttaattatggaatgtcaccttaaagttgcagaaccttggttttatactctttagggtaggcctatttagatttttccttagtcttagggaggatctttaatcctgggggcatagttattactcttaggtatgaccccttcctaggattttagtgaaatgcccaagatgtttccaaacagctcttttggaaaaattgataggatttaaactccaaaatctgtctcccaatcattgagcaatgggcaattggttgaaatcattattcagctttaaaaactttagctctttccaggatttatccccctcaatttccagtcactctggcagccccaaactctgtcctctgacacctcaagcaataagatcacagctttctgcctggcggactagagagagcccttagataaaaacagggtaagcataggaagcacgggtgcagttccttatttcaaaggtcaaactccagtttctctctgccagtgctttcaatttttaaaaaatattttgttcagagtttataaatcttatctgcaggaggattgggccagtggaggatactccatcatcattaaaactagaacttcttctatacccactttatggttcttaaaatgtattccaaaattgaccttcacaaagattagacattctcactggcaagaaatgagagtccctgatatcctttccccttggcagccagaatttcttagaccaaattgcatagaatgccagaaccttagaaaacaccagacccagtacttcccagctcaaggctcctgaatcccaaaagcgtttatgagggtagcacagggtcaaatggcagcttctataaattataagcactatgtatttttccaagcataaaatatacagttattcataacacaaatcttaaatgtcattacttttggttggaattacatcatagttttcctgcagacataggttttctcttgctcatcagaagcactgctttatagttaagtacatttttggtcaacctcaaatggcaaggtgtattattattattgataagtgacatgtggcttttaggacataggaacctcagaaagaaagtttattagaagaattcttggtggccctgggcactttgaatagtaatgagtgtttctggttgatgaatttagatttaatcattggatctatctttgtttataagagctgctatagctttagcttcattatttgctgaggccccaagacatgaaagcacttgcctggagtgacacagactgacaccccttgtgggttcagagatcagaaactaagatcagactttgttctgaacacagcagcatttataactgtgaaggactaattctgatacctaccatgtttcagagacaaaatataaaagggtaaacttagagaagagcactttagagaggcatccagagagaatgttgatgattggatggacatgaccttttgaaatgcctgtgatttctgttccatttcttaccccggcaagaataaaccaattggaattcaggtgaatgaattttgattgagcacagattcatcatatcttgccaggtttgtcctttatttgtctccaatgctgatgcatctggattcacatcaactccatccactacacttacaaaggcaaatgcttccccaccttctgtaatcatggaggaaatgtatggtatagggcaagcacataggtggctttttctttataactcctgtaatatccaggccaatgttacatattccttaatatatatttactgcagcaaaatttagatttatttcaccatatttttccccagaaaagccagcatccccatttacagaagcaatcacagaaacatggagaaattcattacagtcttagtgcctcagaaggacataaatcaacttttaattacctctacctggagatgcttggtgcaatgtgctgtgtgtgtgagactgaatgtgtgtgtgtgtgtcggagattgagtgtgtgagtgtctgagaagtgtgtgagggtgtgaggtgggtgtatgtgagattgtgtgtgagagttagctacgcatctcctctgtctcctcagagccatttcttttctaattgtgctctcagacaaccagccagctaagcagggtctggcgagtctgagacattcatgctggggtttgcatgaagcttgtctccaggaatccaggacacagtttagatttgctcagacccgtctcagcagcctggagttaggatgaccagatcctttgaaaggtaaagaagctgctgcataggaaacagaaatgagtcaatttctgggaagttgctagagtttgaatatttgtcccctccaaaacatgtgttgaaatttaattctcggtatgtcagtattgagagacagtgcctttaacaggtaactgagtcatgaaggttcttcccttatgaatcacagggttatcataggagtgggactgatgtcttcataaaaaaggaagcgagacctgagctagcaggtgagcatgctcagcccccttgccatttgatgctctgtgctgcctcaggactctatagagagtccccaccagcaagacagccccactagatgtggcccctccaccttggatttcttggcctccagaagaaaataataaatgcctggtttcgagtgctctgttatatgccacagaaaaagacaggagtggagaggcttataacccccaggatggccacaggcttatatcccttttatcctcaggggtgaacccttgcctacctgtttttccatccagccaggccagcactgtagcagagggaaaacccaagggccccatatcctggcaatgcagccaggactagtgtccaaaaatatactgggaatggtgctgtgactacatgctgtgaatggaaacagcctgactgcagagggaggagtcaggaggggcttcccagaggacagggtggggtggggttcacccctagtgcagcctcagcaggagaatggggggttgttctctctccactgtgaacctggtgttcttcccttctctggggtctggctcttctactgagagaacaaggtgggcaacagaagtcaccaaaacctcctccagttgtgcaatgctaaccttgagagcagggccaggctgagacaaacacagaacccagcttcttgcagataagatgtgaaaagagtctgttactcattccaggtcctgtggcacttttagcagagatggatgtttccagctggggcttgccttagtttactagagacactgtaacaaaacaccttagactgggtaatttgtaggtaatagacatttatttctcagttttggaggctggaagtccaagatcaaggcgcaggcagatttggcgtctggtgagggcccactctgtacttcatagatggtgccccttgctgtgtcctcacaaggtggaaggggcaagcaagctctgctgcagctgttttataagggcactaatcccatctaggaggcctccaccctcatgacttaatcatctcctaaaggcccacctcttaatactattacactggtagttgtctcaacatatacatttcaaggggacacattcaggccttgcagggctttagatcccaccacttcatcttatcctctttcttgtcccttctcccttctcctgaagcttgaactgaaagatgcttgattttggcctctactttgtcctcattgccatttgtgacaaatgaagaaattctatgtatggtgaggacagcaccatggagccccttagactttagacttgtccatttggctctgtggatatgggttgtattttctctacttttctttgagctctccaaataaaaacagttgataatctgaatacattgaccatgtattctagaggtatacagaaacatgtgtggactctgaagccaaactttctggtttagtcctaacttcaacacatattagaagtatgacttgggcataaattatctgggtctcagttttctcgtctgttaaaaaagacagtgatacagccaggtgcggtggctcacgcctgtaatcccagcactttgggaggctgaggagggcagatcacttgaggtcaggagtttgagaccagcctggccaacatggcaaaaccccgtctctactaaaaatacaaaaattagcccggcgtggtggctggtgcctgtaatcccagatactctggaggctgaggtgggaggcggaggttgcagtgagctgagattgccgccactgcacccaagcctgggcgacagagcaagacttcatctcaaaaaaaaaaaagaaaagaaaagaaaagaaaagaaaaaaaagacagttatataatagcaaagacatggaatcaacttaaatgcccatcaatgatagactggacaaagaaaatgtggtacatatacaccatggaatactatgaagccataaaaagaatgagatcatttcctttgcaggcacatggatggagctagaggccctcgtccttagcaaactaatgcaggaacagaaaaccaagtatcacatgttcttacttacaagtgggaacaaaatgatgacaacatatggatacttagggggaacaacacatattggggtctgttgggtgagtaggggatggaaggagggagaagatcaggaaaaataactaatgggtactagtcttaatatctgggtgataaaataatctgtacaacaaacccccatgacataagtttacctatgtaacaaacctgcacatgtacccgtgaacttaaaataaaaatgaaaaaaaacagtgatagtacctacctcatagtattgttcttggaattatgttagccattatataattcttaaagagttcttggcatgtagaaagtactatgtaagtgacagccatcgttgcttttgtaatgattattttgcttcctttctttttgttcattgcacatttaaatttctaaaagagattccaatgtctttattattaaggtgagaggaaagcctgaatttaccttccccctcttcccagctctgcccctcacagcccccagacctttgctttgcttgctggacccaaagacacacaattcttgtccctgtgcctgggaaggggtgttgggattcagggcagatgtatttaccagactgtggtttgggcccctgtgttgtcttttaacttataaaatatctgtataattatttttcattactagccaccacattcctttgttataactgcttttttgaaaatgaatatatgcacattgtaaacaatttcaagtgaaaccgcctccccatcccttgtctgatggctagtctccctcccctgagggccgacgccactgcttgccaattttgacataaggcttgaaaccaatgagtgtccagtgactgggtgagtttggttcctcctacttgtcttggcaatctcaaacagttccaggagaagattgtttcttggagagtgggtggcaatgaaataatagcaatggtggtcaacctttattgagcaggaattgtctgccaggcacccttccaggagctttgcctgagggatctcgtgatctttgtgatgagctatcgaggcggctactgctgcgacctgggatggagatgcccaggtggaggcccagagaacggaagtgtccttctaaggcctaactaacagataggggacttccatctgctccaaggatatctagttccagagtccacactcttggaatctagaaaactccatcaggactaatttatgagcatcttagaaccactttccctgaaatttcctttctacaaacctaggaagggttttttctcccttcttcctagcaagttcttagctttttatggaataagaaaatgcacagagtggccttcatcctggacaggctcctttgatgtgagccacgaggcacctagggctgggtcatctgtggtctctgcaggtggccaccacgtgtccttgggcttccccatctgctccaggctttggtcttttaatttcaaaagcagggaaagagcaggctcacctgaaccttctccagagttctttctattactcagagtccatctagctaaacatgtttttaaaaatatttatttgcactggtgagcccatggccatggtggaagtggggacatgggtaagcaagagtccaccctgccccacggagctcacgttccgcaggagtggaacacacagcagccctgggcaaggcacctctggcctgtccctcacctgctttgcacctggttatgcttcccttactcccagtagcaagtgccccaggaaccccgtgggtgacctactcagtggtaggctgtgcctgcttgcaggagggaccagaaggctacctggggttacttctcaggcatgagccaagggtcacattataaaagctatgccagattccccatagatgatcctctatccaaaaattaggagctcttaagtcataagatgagtcaaatctacccccttagaactcaacatagctatgttcagttttactggaaaataagtcactggaaagcactttttatggttttctaaatctctcttatgcccaaagaagtggttcagccctggtctaaggcactgctcacttactctgattgccatcttcagcatcatcgtgatgatgataatgatgatgatgatgatgatgatataacaagatagtagcaataacaagagctgcctcctcccagttgtgaaattatgtttatggatatctggggctcactgttctctttaggaatgacccctgagggctcatggctcccagcccccagtaccgcaggtaaagcagtgaccctatctccagaaacgtgggtaccaccaccacagtcatagcttagatggggcaaagagtgctgactccagaagccgccatcatcaccgactgtgtcgaatttggaaatggggacagaaatgtacacatacccatgggctttgcagagaggccatcaaatcgactgtttctttttggttgtaaaaccctgaggatctctctgcatttcttcccttcccacccccattgtttaagcctcagtttctcctttgagctacctgggattctgatgggcaggattgctcggtaagcgctaagctctgtccacaactcagccattttgtgtctctggtttgctttggatggcagttttccccttatcctgcccagatttccagtatccaagcccgttattttcttatattcttctttatgacctgtatttttccaaagattgggaagcaaaaatgtcaaggtgatagatgcatatagataggtaaaaagatgacagtcagttttaatcctcattttgcttttctgtatttccaaaatttctacaaggaacatctattgtatttgtaataagaaaaatagtctaatgaggccgggcgcggtggctcacacctgtaatcacagcactttgggaggccgagggggcggatcacgaggtcaggagattgagaccatcctggctaacacggtgaaaccccgcctctactaaaaatacaaaaaaattagccaggcgtggtggtgggcgcctgtagtcccagctactcgggaggctgaggcaggagaatggcgtgaaccctggaggcagagcttgcagtgagctgagatcgcgccactgcactccagcctgggcaacagagcgagactccgtctcaaaaaaaaaaaaaaaaaaaaaaaagagaaaatagtctaatgaaaagcaagttggtgccttgaagttgagtgttttggttgaatgttggctaaggatccagtcccccagaggttagttaaaagcttttcctccagccctatgaccacaggggtaacaactcaactcctcaggccatgaaatttcagagggttatctttgtcctgagcctcagacttctgtggatccaacaagggaagggctgtccggcagtggagacttgacatctcactggctcccaatacttgcagctgcagtgtttcttgagcactactgtgtcacacacggcctgagtgcctgcccccatcttcagagaatggcacccgggtctggttggctcacctcactcaaagtggcaggaccgtctctactgcatgcattttctgtgtggtatgtttttctttctttggtagctcataaaatttccctatctgtgctgggcctcttggtctttaatcttcaacctctgctggagctgtccctatttctttttaattatgcctctttttttatggaagtttcctattaaatttttatgactatatagagctgtggatagactccaacaaaaatgaaatctttatggaatagtcatttctctccaggagcccctgatagatgttcctctgtggatagacacacatgtgtggtgggggtggggaaagtccctctggtcttggctgcagctgggcaggatgcgggagaggcagctgagctgcttattcctcagtgtgagggctgctgggagcgtggggtgcagctcagcttggggggtgggggtgacgtgggatgcagaggataagaagtaaatcttccctaggtgtaatttctttgccttggtgtctgctgaattagcactgctccctaatcccaagccatcaagctacatggctgcatatgagcggagacatgccccgttactccttattcagaaccttcatggccaggcacgttggctcatgcctgtaatcccatcactttgggaggccaagtggcagatcgcttgagcccaggagttcgagaccagcctgggcaacatagtgagacccttctctatataacataaaaatttaaaaaaaaaaaaaaaaggagaagaaaagaaaagaatctcctgcccaggtctgccagctgagcttgcaaaaatgttatccttggggctaacattctgtattagttcattttctcgctgctgataaagacatacctgaaactgggaacaaaaagaggtttaattggacttacagttccacatggctgtggaggcctcagaatcatggcaggagatgaagggcacttcttacatggcagcggcaagagaataatgaggaaaaagcaaaagtggaaacccctgataaacccatcagatctcgtgagacttataaactatcatgagaataacacaggaaagactggcccccgtgattcaattgcctcacccctgggtccctcccacaacacgtgggaattctgggagatacaattcaagttgagatttggatggggacacagccaaaccatatcacatcctaagtgactgtctggggtcactggaccctggcatgcttccccctgtgccagctaccagctatgtggtctgggaatggcttgggatccacagatagctctccaggggggtcacggaccagagttgctgttgcagggtgtgagtccccttgccagggagggaagggacagtcattcacttataaacagatgttgggactcacccaaattgagtgctgggcctagatcagggcaccagggatttctcattcttagtcccgtggagctgatgttcctgaaggaggaaatggagaaaactcaagaaagcttgtaaacgagtgaggtggttttagattgtggtgaatgctggggggcaaacggagatattaagagggctgccaagggaggaggagggaggggttctcatttcaacaatgttcagggaaggctgcctgctggggcgatcctggagctgggacaggatgatgaggggcttgcatactcagatcaggggcagagccttccaggcagcaggaccaacaagtgcaaaggccctgaggtggaatgagtttgtcaagttgagaaacttgtcaagatgagcgtggctgggacagtgtaagccatggggagagtggagagacaggaggctgggtcaggcatgggagatttttaatccttgctaacttactttaaatgtctaaagacaccattttgactgctggacaaagaatggactatggaattgcattaaagtccagaggtccagtttttggaaccaccaggaaggcaacacaatgcgcctactctcaaagggatttggggaatggaagaaggtggggttattgtttcatcaggctgcttggatttagacctgttttcttaagctgcaagatctcctacaaaactggatcctcacctaagtttggaggacaactgagaagtgatagttatgtttgcctccctgcagagaataaactctcaggagaggatggagcactgcagctcttacctatgaaagttgataaggaagggagtctccaatgtgagtgtggcaactgtctactcactggaaggaacagtgatacatatcataatagggaaggaaatgaacagcatccattatgtgatggcgtctatcccatgtgttaggtcctgtaactgacaacagccgccctgaaaagtattattgcatatgagactggagaccagagaggttaagtaaattgcccaagatcacatagctactaagaggcagagctggggtttggactcacgtcggcctgactccaatgcccttgcatctgtcactcgtgcccatagccctagtcaacacccacatgctaaaggcgtcagtggtcccctctaacaaaagctgttatggcttctcagagagactggagtccatggctgggagaggcaggggtaccctgggagaaccatgtgtcatcagggttctttccaggcccttccagccacccacccatgggcataaggcctaccccagctctgcaaggtttcaaaaaaacatgcttgacacttgaacaaaaattggctccaaaacataagaagaaagctgcaaaaccataattagtaatttagatcaataaagaataaggactataaagaagagagtaggggaagtagggaaaaaaaggaacatgatgtatttattaccattgaacaatacacttaaaatggtaaagatggtaaatcatatatgtatattttacctcaataaaaaagaattaaattaaaaaaataagcaaaacaaacgatcttattttaccttcatttatgctttctctgccctgcatctctgcctgatgctgaccccagtttctgactaataaggttttccttctgcctgaagagcttctgcaaagctgtccttaggacagatctactcgctaggaattccctcagtttttgtttgagaaaaatatttatttctgtctcacttttttaaaaattaagctttgttttgttttgttttactataattatctttttgtttgtttgtttgttttgagatacggtttgactctcccacccaggctgaagttcagtggctcaaacatggctcactgcagcctcaaccatctgggcttaagcaatcctcccaactcagcctctcaagttgctggaaccagaggcacacgccaatacatcatgctatttttttttttttacttttgtagaggtaatgtcttgctatgttgcccaggcttgtctcaaactcctgggctcaagcgatcctcctgccttggcctcccaaagtgctgggattacaggcgtgagccaccacgcccaggccaaaattaagcttttttatctggagatcattgtaaattattctgcagttttaggaaataaatcagaaaatatactgtgtgacctttatccagtttcccctaaagataacatcttatatgatagtataatagcactgccagaatattggcattgatatacttttacttgtcctcattgtgtgtatgtgcacacatgcatgtgtatttagttccatgcaatcttatcccacatgtagggtctgtgtatccatcaccacagggttcctcttgctgcctttttatagccatacctccttccatactcttctccttaacccctggcaaccaataatctgttcttcatttttataatgttgtcatttcaggaataatagactcgtggtgtgcatgtcttttttgctcagcacaattctctggagatttttccacactgttgggcacatcattatccaatgcccccttttcttgctgagtaggactctatggagtggatgctccacagtttatttaatcagtcaccgaccacacagagtgaggctggagagaatggcagatgagagaggggaggggtcgggacagggaaagaaaaccctctcagagatgtctcacgatatctgcagtaaaacctatactctcaaacaaaaactttcttggtggactcttttcttcttctgggaaaagaggcaacataaatggacgcagatcacctgccacatacacatgtgcatactgatatgtcccctcgtgtgctcatgtgtacacatttttgcacatgcatacacacacacacacacacagacatgcctgtgaagaggccaaccccagtgtgcagcagctgtgagggggctctgcccctcctctcctagaatggaacatacgttcttgtgaacatagagagtggcattttcttatgtcgatgtaatgtgaacaactcctggtcaccagcccccttgaccactgatgcctcttcatgggtcggtgagtgagggagacacagccatttattcctggcatcttgaattaaacttgaaattactgcccactagaaataaggcctggggcatagagtcttattattaaaatcttttgtggaaagtcacagggctccaatcaccccaaaaacattgtgtctatgggaaaatgcaccttgagttccatcttacaaatggatttgtaacagtttaggtttcatgtaagctgttcacagtatcctagtgatacatgtttatggtaaaaaatcttggagggtaaagaacaaacactgcccataattttttactgtatacacttttttttcttataaaaatgttactctattgcacatagtgttttgaatcatgccaatttttatttggcaattatataaaggcagaactttaaatatcacccccaacattctgtgcctatgcctcagagcctatgcttaaaaagagcaatcatattcatgactacgtatttaatgcaacattagaaaactaatgcagtcataacccacaagcgttttccatgccaatgacctttttgccatctggtttagtgactgcagagtatcccattacatggttgtctcacaccttggcaagcatcccttaaggatggacactaaatcatcatggggtttaatactctcatccacagaagagactcccaagccagtcctcacatatcttgctctcattactagggcagagggttctaagaattttcctcttatgggccaccaccagagcagaccagactcactgtttccatgcctgctggctcttgctgccaccatgccctgatttcaaataaccactccatccatgagctaactgaccttagaaagatatacttttaaaatgcatatcctcccaattttcaattaaggccaaaaggagtagtagagaccaaatatatcctctttcatgaaacaaacaaaaaatggcaaaaatatgtgaatctacgaaaagatactagaactcttaagtgaatttagaaaggatacaagctgttatatcaatatttaaaaagtcaatttcatttatatgattaacaatgaacaatcagaaagtgaaatagagagtgtcatttataatagtatcagaaatataaaatacttagaataaacctgacaaaggatggggaagacctgtatactgaaaactacaaagtattcctgagaggaattaaataaaacttaaataacataccacattcatgtgttcagtctgaattacaatgtctaaagttaaacatactgaccacaccaagtgttggtgtggatgtggaggaactggaactcttatatgttgctggtaagaatgcaacatggtacctccactttggagaacagataggcagtttcttaaaagttaaacatacatttactatattactcagccattccactcctaagtatttactcaagagaaatgaaagcatttgtccacacaaacattcttacatgattgttaataacagctttattttcaatcacttgaaactgaaaatgatccaaaggtatagcaacagataaatggactgtggcatatccatataatggagtactatcaagcaataagaagaaacagacagctgggcagtggctcacatctgtaataccagcactttgggaggttgaggcagatcacttgagctcaggagtttgagaccagtctgggcaacatggtgaaaccccatctctactaaaaatacaaaaaattacccaggtgtggtggcgcacacttgtaatcccagctactgggaaggctgaggcaggaaaattgcttgaacccaggaggtggaggtttcagtgagccgagatcacgccactgctctccagcccgggcaggcgacagagagagactgtgtctcaaaaaaaaaaaaaaaaaagagaaagaaagaaagaaaagaaaagaaaattagcagggtgtggaggtgcacacctgtagtcccagctactcaggaggccaaggtgggaggattacttgagcacaggaggtcaaggctgcaatgagttgtgattacattgctgcactccagcttgggtgacagagtgagactctgtctaaaaaagaaagaaaagaaagactattgatacgtgcaaggatatggatgaatctgagaacaattttgctgagcgaaagaaagcagaggaaaaaacatacaagcagcatgatttcatttacataaaatttttaaaaatgcaaactaacctatagtgacaaaaagcagaacaatgggaatttataatgttaaacacatatgtttattagaaaaaaaaagatctacagtcaatcattcaggtttccatcttaggaaactaaagaaagaggcctaatttaatttaagcctgaagcaaggaaaataagataagtaattaaaaattagaacagaaattaataaaattgtaaacaggaaaacagtagagaaaaatcataaaacaaaagctggttcttggaaaagatcaataaaattgataaacatttagtcaggccaatgaagagagaaaagacacaaattattaacattagaaacaaaagagaggtcatcacaactgatcccatagacatgaaaaggttaattaagtaatacaacaaacaactttatgctcataaatataattaaggtgaagtgcaacaattccttgaaagacacaaactattaaaaccccccaaagagagtagtcttatattcgaagagattgaataatttaaaaccttccagaaaagagagcactaggctcagatagtttcactggtactttcaacagaatacttaaagaggaaataataacaattctccacaatatcttccaaaaaatagaggcagaggcattgcttccaaactcattttatgaggccagttatcttagtctgtttaggctgctgtaacagaacaccacacaaactgggtggctcataaacaatagaaatttatttttcacaattctgaaggttgggaagtccatgagcaaggcactggcagatttggtatccagtgagggcctgctctctgcttcataaatggttccttctagctgtgtcctcacatggtggaggggatgaggagtctcccttaggcctctactataagggcatttaggtctcttctacaagggatcacccattcatgagggctccgccctcatgatctaattacttcccaaaggccccacttcttaatacaatcaccttggaagttagaattccaacatatgaatttgggggaacacaaacattcagaccatagcacagtatattaccctaacaccaaaacctgctaatgacattttaagaaaggaaaaactacagaccaatatctctcataatcatagatacaaaaaaatctttgaaaaaattattgaatcatattcagtaatattatataacataaccaagtgggattcattccatgtatacaaagctggtttgacattcaaaaatcaacgtaatttaccatatcaatgggctaaagaagataaatcacatgactatatcaactgctagagaaagtatttgaaaaaaatcaatacctatctacaataaaatctctcggcaaactagaaacagagggtatctcttcaacttgataaagaacatgcacaaaaagcctgcactaaacgtcatacttattggtgagaggctgggcattttccccctaaaatcaagaataaggcaaggatgtcctctctcaccactcctatcgaacatcatactggaagtcccagctacagcaataagaaaaagaattaaaagaaagatatacagactggacaaaaagaaacaaaaatggtctttattagtagatacactgtctatgtaggaaatgccaaataatctgtgcacacaaaaaaaggtgaaaacctcattggaaaaggtgagtataacaaggacacagcatacaaagaaaatataccaaagtcaattgctttcccatatacaatgaacaattagaattttaaatgaaatttacattaccatttacaatagcatccccccaaatcagtatttagttacaaatttgacacaatctatggaaactgtaggcaaaaagctagaaaatactggcaaaataaaataatctaaataaatggcaagatagtccctgcttatctgttggaagacttggtattgttaagatgtgaagtatttataacttgatcagagcagtccaattcaaaatcccagcaggttattttttagatattgataaactgattctaaaattaatataaacaagcagaaggcctagaatagctaacacaatactaaagaagatcaaagttggagtactcagagtccttcatttcaagaattactataaagctataataatcaagatggtgtggtattggcaaaaaaaggacacataaatcaacaaatggagatgccagaaatagacccccccacacaatataataacctgacttttgacagaagcgcaaaggcaactcaatggagcaagtgaagtcttttcaccaagtggtgctggaacaattggatgttcataggctaaatgaatctggacacagaacttgcaacttacacaaaaaataactctaaatggatcataaacctaaatttaaaatgcaaatttataaaacttttagaagaaaacataagaaaaaaatttatgtgaccttgggtttggtgaggaatttttagatacacgaccaaaagcatgaaccatgaaagaaaaaaaaatagagaagttggactttattaaaattaaaaacttctgctctacgaacaattctgttaagataatgaaaacacaagctgcagactgaaaagaaatatttgcaaaacatgaacctgataagaaacttgtatccaaaatattttaagaaatcttaaaagtcaacaaaaagaccataagtaatccaattgaaaaaatgaataaatctgaacagacacctccaaatcaccaccaaagatgatatttgtgtgtgtgtatacatatgacatatacatatgtacatatatgtatatatatatatcttacaaatgggaaataagcatgtgaaacatcatctgtcattaaagaaatgcaaatgaatacaacaatgagctttcaccacacacctattagaatggctagtatacaaaaaaccaacaataccaattgctatgagaatttagaagaataagaacccacatgcgtttctggtgggaaggcaaaatagtacagctactttaaaagatgtttggaagtttcttaaaaagttaaatattattttactgtatgaaccagcaagcatactcctagatgtttacccaactgattgaaaactacgtccacaaaatacctgcatgcaaatgtgtgtagcaacgttattcataaccaccaatatctggaaaaccaggatgtctttcagtaggtgaatagattaataaactgtagtacatgcatataaaggaatactattcagagatataaataaatgaactatcaggctatgtaaaaacatagataaaacttaaatggatattgtttactgaaaaaagcttatccatttatattatgttctagaaaaggtagaattatcgagatggtaaacggatcagtggtttccaggggcctgtagagatggaagagtagagtaggcaaagcacaagagatttttttttagaatggtaaaattattgtgtatgatactgtggtggtgaatacataacactgcatttttcaaaacccatggaattttacatcacaaagagtgaaccttaacatatgcaaattaaaaaaataattaaagatgttgggggattccaagatgggatgctgagtatgacagaagactaactgtattacaaatgtataaaataattccactgaaggggtgggaggaaagcgtgctgaccaagtggcattggaagtgagtggagactgtaagactaaaaacataaggaactgtccacaaccctgtattctagtagataaagctctttcccaaaaggatataaattctgaagccactagtcacacactctgaaatgtgaagtcactggatggaggatggtgggagccaggtttatctttgttggaggggaggctaccaacaagcaagcaggaaaggttgcagtgattcatatggcagtggttagtgttggggacatcaacgtggaatcgagttcagctcaaaatagatgcagacggatatgtacaatacacttacagatatgggttggtatatatttccttgttctgtctcctgacagggcctgaataagtgtcatcccagtagcaatgagcacacctactgtttacgtcttagtttttgatgctgttcttttttttttctttgtaacatttaataagctcaatctacatccagaataatttacatgaaaggacaatatttatttaaacagagctcagtggggtagccatggtatcatcagagtgcatccagaggaaaagagggaggaagggccgaagaagacacaatcaacggcactcccacacttttactgtttgagccacgctgccagtgaccacatagggtgctgtcttgtggaaatccaatgaggtaacaaagtgttcatacgcattgagggtcttcatgcattgcctgttcttgtaatcccatacgtgtagggtcttgtcatcagcacaactcaaaataaatttccccccagaactgaacagaacttcacgtacccagttaccatgacccacgagggtcatgaggcacatgccggtactgacatcccacatcttaatagtcttgtccctggatccagacagcaagaatggcccagatttaccactattttttagtctcagagcctgttgcttcagagatggaggaatatgagctttctggagcccaggaaatgcattctaccacatgctcatgttctcggagctcacccttgcattgcattgttgctacaacccatacacgcacagtctggtcattggaacagctggctatcagagtgccatcttgatttggttgtacaatatgtacccattctctctgtcctgtgaacatcttcacacagtagccagtttgcacttcccacatttttatagttttatcccttgaggcggacactatatgatctccactggccatgatgactactgaggaaacattatggtcatggggaaccatgactatgcatggttctgatgcattcaaagtcctgaaaatcccatggtttaatggtcatagctgcagaacaggaagccagaaacttgccactgtggtcaaatgaaatgtcctgtacagagtctctatgtccttcctttaagagttctttcaaaatctccagtctcataatcccacaccttaactgtagcatcctctgaagcagagaccataacactgaacacaggatggaaaatgactcgaatgattggactcctgtgaccactcaatgtgtattttttctggcagaaaatacccattcttttgggtcttgtttctgaccaagaggtccacctgacgtaaattcttcttttgcttcatttagcgttgattctaattccataaacttcttttgtaatctaataacagatgtccattttttccccaaaacaccagcctactttatttcttcattcatatctaattcagcttcctttttaaaaactgaatatgcctcttcgtagccatttgaacgaagataatctgctttagcttgatttagttcatctcgttgtctctgggacagcaccatcttggctgtaatgtcaagcttatctcatatagtggtatgtccctcctttgggaaatgaaaaagctttttgatccgtggacgtataatataaatatgacactaagtgtcttccactcagcggaaaatgattcttttacaaatgaatccaactagtaaccagaagatattcaacaagtaagattcattctactctcccggccgctggattctgccactgccccgccgctccagctctgtctgtcacaggagctgccccaacaccctgacgtcactgtgccaccaccgccactgcccccaccaccgcccccactgttcttaataccatttaataaaaggaagtaagccttcctggagaaatggctgattctaggacaggcggggaatgtacaaaatgagcctggaggagcattttacagggccagaaagtaagaacgtgttcagaagaacaaacaataacacacaggtcaaggagacacagtgaccacttgaaaaagctttcaatggcctaagctggaacaatttgagcaataaagtagtattggattataaataacccaagtataaaataaatatgcatgattccatactgatttacatttatatatttagttaatcacatacatatgaataagtaaatggcagagaataggcacatctccagagtggtggaatttcaggtaatttatgtaatagtgcacccccaaggaggtggagcataattctcccctccttaaatatgggctgcacacagtgacttcctttcaaagtgtacagtgtggaaagggggcaggggagaaacttcacagtggagacgtccaacaaacactgcctcagccagatgatcatggtcaacatcacgagtgacgtcatgttgataggatgtgctcctgatagaatgtgatgaaagtagcactttacttctgtggtcttctcccaataatcataggagaaaacaccaggcaaatcccaatgttgggacattctacgaaatacctgactagtgttcctcaaaactgtcaaggtcatcaaaaacaaggaaagtctaagaaattgtcacagccaagagaagcctaaggagatgggacaactcagtgtaacatggtgttctatggtggaaggacagctgggtcaactaaggatatctgaatgaagggtgactttagttaatatgcatcaacattggccattaattgtgacaaaggtacctcattaatgtaagatagtaacaatgagagaaactgggtgtgatatctagggaaactctctggactattctcaacttttctggaaatttaaaactattctaaaataaaaagtttatttttttaaaaaggaaggcaatcccctttctctctcctccctctttctcctttccctctctttcctcatttctcccttttccttcctcctcttcctcctgccccctcctcttttcctttaacaataacaataatgtgtagtccattctcacactgtgataaagaactacctgcaactgggtaatttatgaaggaaagaggtttaattgacttgcagttccacaggctttacaggatgcatggctgggaggtctcaggaaacttgcaatcatggcggaaggtgaaggggaagctaacacatcttcacgccggagagagagagagataagggggaagtgctacacactttcaaacagccagatctcgtgaactctatcaagagcacagcaaggcggaagtccacccccgtgattcacttacctcccactaggcccctcctccaacactgggaattgtaattcaacatgagatttgaggggggacacagagccaaaccacatcaaatggcatcacacatgtgaccagtacgttgtcgtttccagctctcttcccttgcattattctgcaggagcccttgccacagtgcagtgctggatgtggtattcttgaattcacagttgggccagggaggtgaaatgacccacctaggaggtagcagaggtgctagcagcactcccaagactcatagtgaattctcctgggcctgtccgtcaccctgttatgccacttttcatttccctctgatcacaaatgactcagcacacagtgtaagtgctacaattttactccagaatttgacttgtattgtcctacagactgcaggtaccctcttgttgctcctttcccttgaaaaaaaatacatcatctcaaaagaacgcaaccaggagctggcaatggcactggaatcccttcctggtcacagaattgatgctcatctgcccagtgcatggcacttttacaagaaatcttatttggtcaaccccccaaatatcacagaaggacattattattatctccagtctgcagttgagaatgctgaggctagaaagtggttaccactaaaagcaaaccttttctctctttcccattgcctatccaccctgactctgggctctgacccatacccacctgctcaaggtcccaggtaggagttgcccattcttttaagtatgagttcattcatacacatcaccatgtgaggcttgatgtgacctcagtaacaagcaggtctcatctgccctgtgcatgtgaatgtgccttaggaagcttatcaaatcccaaaggagaaattacatcctctaggaaaagtacagtgaggtgactgtcccgtttcctttactggctctggaccacagctgagttcccatgcacgcactgtggcacacgagagtgtgggcagaggcacttctgctgagtgggatgaaacatcttaagtgctctgagggttgaaactttgaagaggttgagatctgtgagagctgaagaacctttgaatctcccttcagctctccctaccccaaccacagcccttctcttgatgtaaaacatgtgttcagatagaaaacaaatgaggcttacttctatgccagtaggactgtttggctttaagcttccccagtggttgaaaacagcaatctccgagatttgcccaaaactttaaatggaagtcactcccatgggtcacatccatggatttgtgagatagggcaggaggctgtgtctctgctacccagcggtgggagcaggggtctgtgcagcctgattgtattggggatgggcccctcgtccagttgcctatgaggataacctgcggagaagatcagatggagatacctggacttatgcagaggcgtgttcgggttaaatagaaatgcccagggtccaatagagggaaccttccaacaagtgtatgagttggcctctcacccgacgctggccacccagatgacagcttcttggacatgatgaatggcctcacttccaccagaacatcttcctgccaggccctgctgctgcttccccagctgtgtggccttggatgagtaacatggcctcttattaaagaaatggatgaaatactttctaaagaatcttccaactctgaagatctgtgacatcttgtcactgaattaataggaaatcagctccttatagatttggtctatgttaggagacaacctctgttgatgggctgaccgaatgtctgaagtgggaaggatttggggaccaaaacaggtaacaagagtagacgaacacaagaaattcaggttgaattaaccttcaacagatatttattgagtaacttctacatgtaagtcaccaaaatctgggaaggggaaatggataaaagtacgattctctctctggaaagcctatagtctaattaattgatgtattaagtaatgctgggtggaggaacaataacccaggacttgtataaacaataggaaactctgggggaagagcaaggctagaagagacattatctgggaggcaattctagagcaggtagatttcaggaacaggacaatcaaagaaaaggagagtggcattcacacatcaagtctaataatatggccttattttatggtccacctgagtactgcagaatttagccctaggtactaccaggtccaaagctgcttctttaagctacactttaagctcctgtcactagaaggggctgtcagggtgccagggattttggtaggttccgtgcggacttccctagtcctagaggacgttggagtcactggggtgtgaggacattggagagacaggaatagagttccacgctgcgatgaggagatggagcctgatgcaaagccacagggaggctggcgttgttggggtgggaggaattcccacccagtgggagagttttacattgaggactacatacctggtcagggtataaggcaaagtgggctcccactcctgacatgttcctctttaccgatgttccttgtgaacttattccccacctaggacagctaacactttaagctcttgactgtcatttatactttattcatgtgaatgagtttttagttttctcttgaaagcaagttgggatactaggaaagttgacaagagtttgagtttctatgttggttgggaaagagtgatgtctccacatgtaatttgtagagggtcccatcagtttccaaaagaggaagtgggtgtttgtcttgcttttgagacattttgggagacttagacacaatataatttctattgagaacaaagtagggttaggatttggagaaggaagacagatatttccttctctctgctaaagagatggtctggagtagaaaacttgtggactgtgtttacaattgtggagtactactcttggttaaaacaataaagcagaatcgatgtctgtagaacagagctggaaggggcctcatggttggttttcaaggtaaactaaccacagacatcagttttccactcctctgcctttttagcatctgggttcatcttccaggaaggccataacaaaactccacaatctgaggatcttaacaactgaaattgattgcctggaagttctggaggatgaaagttcaaggtcagcttgggcagcgtaggtttcttccgggtgccatgagggagaatcattcgtgcttctggtgtttgctggcagccgctggtgttccttggctggcagaagcaccaccccaacctgtctctgcatcttcacagggcattctccctgtccgtgtgtgtgtctgaatttcccccttttataaggacaccagtcatgttggattaggggcccaccctactctagtataatctcatcttaactaattataccggcaatggtactagttccagataaggtcacatcctgaggaactgaaggttcagacttaaacacatgaatgtgggggaggagacgcaactcagcccataaccacattctttctacacagggagttcaagttagagagcccatcaaatcatgcagggaaaggagatgaaatcctctgggtccgtcactgtttgaggcagccctagacacatgctgagctattgtccccactttgccaatgcagactaagcttgtgtccatggaaaagcccagtgtgaactaagatcactggatgcccaccttggtgctgggggccggggcccacacagaagtcccaggcccaacctgaggggagcaggctataccaggccgaggatggcccccttgatttgggtgcacactcaaatgtacaaactactgcctgcaccacagagactggcccggaggtgttatcttcccagagggctgggcaaagggctatctttgaaccagctgttcccactcaggcaagagtggctttgctgggcctccacttcctccactgtaaaacgagggtgatgctctgccctgcccgacccatctagggtcaggtgaagatcaaatgggataataagatagaatgtcttttgaaagacccacacacgaaggtggcatgagggattgtctttatgactatcatgttctatgcagccctgactgttacgtgctagctggctgtctcatctcctcgaggtgtcctgcgtgcctgctgatggggatgattccaatgactaaaaggtacctggccttctccatgcccagctttacatccagtagaggctcaggccaccctcgatggcagcctgcccgctgcgggcctgcttgtctgctcaaagcagaggttgacttgcgcccaggttgcattccagaagtcctggcctgctttctccacatggttagcttcgagcagtgagcttgggagcagcctttctgcgagttctgccaggtgagccagcccgcaggagtagggggtatcccaggcacgcacctgtggctcaggtttctcccttgtggcccgctctctccccactgctgttttccagagcacctccatcctgcaagattgacagctcactcttggtagggaacagagtgtaggaagtgatcgtttcaaacttctcttgcagctccatctgccaaaagcccctctaccagttgccgtatttaccctggctgccaggcctctctcagctgccctaagaaaacagattaccgtccagagcaaagtcctcgtgtgtttcctttctggagatgaatcaagttctgaaagaaaggtttcctgtagcccattacaccatttcagtttgttttatctgtctccacctgcagagcagggaattaacctgctgcccagggccgggccagcgaatgcttggaaggaaagcaaagcgcacgggtgtgcattttttgacaacagaccatggccttgttctcctcagcagagcattgtccccatgaggcccaggcccaaatctgaataggactttgtgtaactcgatctgttttccttcttggctatagtctctgtgccaaatttaactgtggtctgtatatatagtgttgtgggagggtgggggtagaccagggaaggttgggggaggggagtatatccatgcagtttttttcctgtcttcctttttttgtgcttgcctgctttgctcactgtttgctatatataactcaacatgactgtcctcgcatctccagtcattaaccctttagggataactaatgcacctctttatgtaggcccctggctgggaagcgctggcactgttggagttaacgactggcccctggaaagtgaacttccccagaagtgcttgtgaagcaattaacagggccccactcagatagtaaaaatatcccctggcttacaaacaagcagagaagcgcctccaagccaagagtcaccgctgtgccccaggcatgtagtgggcgctccctctttgaaagtcttgtatcttagactttgcagaaatgctacgaaagctggtgatgcagcaacgatttcaggggagactgaaatctattgtccaactgaaagcctgtcagggctgggcctctctcaggaggtgaaccatcccaagggtcatggaaagagctactcattgtgggcctggggtgacagtgacccatcctgggtgaacagaagcctcacttcactttgccggagggagacagtaggctgacaaactattgtggaatctcctaaaattggttgctaaagggagcttctcaccagggccagcttgcctgggctcttctttcaaagggtggagtgttgtctgccagtccccaggctcaggggatgcaagtgaaagggcttcgggctttactgttcatttcctcagaatcatagaagtgccgaaaattacaaaactgcggtctccctgcaagggactcaagatgtcttgggtcatcttaggctatatttagaatggaaaatgtgttggctctgaggaaacagggtatgtgtccttctccaagcaggatgctatgaaccttgccccataggccctcctacccatcctcacagagccctgaaactcctcctccaggaacccttccagccagtgggaagaccccacagataggacccagtttcccctgtgaatcaacttctctagcacgtcccactgcccagggctgggaaggtccagtgtgcccagtgtggcactgttttccagggctggatgcatgtttggtcctccagtgggaactctgctatcgtccctgcttcaccaggagtgatgatggggacaggcacggcagagagtggacacagggatcctggccttagggggcagtcactcatccagctcacacttgtacatacgtcaccatggacacagaggttttcagtatgttaacgatttgcacagtccacatcagcatcccgttaactttctttttgtaaccctcagcatggttttaagaacctggaagtttattgcgtaactgttttgcttgtgaagttgcacatgatttctcagaaagatcaactcaaacccaccttgtcacccctctccacccaggccccacttcctgctttgctggggctggggggtcagaagtaacatagctagagacagatgtccatcatctgtgcttgtgatgacaaaaggaggtaacaggagtacagtcagaccctcactccttggagccctgttgtgagccgctcatggcatgcaccattctctgtcctcacaacagctcagacgggtaggaattattggattctttctctaaacgggaaaccaggggttttaggtgccttatccatggaccctgccctcacctccctcacccagtgcccccctgtgccttgctggctctatctgtgaaatttatccatggaccctgccctcaccttcctcacccagtgcctccctgtgccttgctggctctatctgtgaaatgtctcaagagtccatcctgttgtctcccatcccatgtctcccacttggcccacagtccagactcttacctgtccagactcctactccagagagagccggcaagatctttgggaaaggcacattgagccatgtccttctcccccttggaactcaacagtggcttcctgtcactctgagaacagaatgcagcctcctccctgtgcatgacaagcacctccctgaggtcacagctgtgtctccctgactctgcactggtccagtccagcctcaaggccttaaatttgccactccagacccctggtttggaccctggactctgaatacattctggtcttttcctcagggaggtcgaggcactgtcctagcttgtgacctgctcccatacctattttctcagggtggaagcagacgctccaactcccacactgtgaggctggtaccattacctccaagacccaaagcctgtaggaagtatagcaggcctcacccaataccctgcagttccctcacttgctccaagtgggaggtgggtcttcacgggtccccaagatgagggtcagtggctttcctctttcacaggctacagtgggagcgagtcttccaccatgggacctctggccagatctcagggctctgtggttgggggaaaatggctctctttcatggggctttaagacatgaactgacatgacatgtcctagagactatccagagagcatgtggatcactttttgctgctttagatcaccttctttaaaatcaatgcattgacatactttcagcacttaaattttcgtattctattatcgcatcatctcagaagaaaagtctttcataattaatgaatctcaggttgggttaaatattcagtggctgcccacacaccacttactctattgcttcaaaataattggctttcacttatcaggtctactagaatgactgtcttaaaccagtcacgtggtggaagcgtcaccatgtttcttgctcagaaaataccctttcaagggcttttctaggggagccggaacagtagccaattctagtgggacctttaagaaacaactttgcccaggatgatatttgagccccctaaagggccaataggggtccctctattcaactttccctccgagtcccaccaacctccccactttggttccatacagcttggattattgccctactagttcaaaactgaaagtttcaaataaaaaccaaaagacaaatgttaagtcacattgaattgataactgagacaatctgtcaagcatattttgctttcctgatttttcaaaaaaaccctaatgttgcaccttccttgttgtcagtttagtacgttaacatttttttaattaaacttcagtatcattgaacaggtcatagagtgtgagcaatattgtctttgttccaaaactccaaatgtaatgaagctgccattcacaattgttttccgctgggctgcttattttaaaaaaatgattttgatgaataaaaataggtgcattttcacagcgtggggtccagcaagaatgaaaaccttacggatcacagcccggcccctgggggtgcgggaggaggtgttgtcagatgtcaattttggctgattgtttttgaggtcatgagactgccattcctgtgtcctgtggtgcattttagagactgatgtcacttttttgagataaattattagagaaatgtttatagatgaatatacatttcacagtgtgccagagttgaggagtctaatgaagtttagaagggacactgggatgagggtgctgagctgcggtgcctgtggcctgtgacagacacctcctgcaccaggaggcaaggatcctgatggtcagatgctcagtccccaacaagagggggttcaaagccagtgcagccccttcctcccaccgctgggggcagcaaaggacccacagtggagattgcaaactatagcaggggctgtgctttgtgtttgttttcaatatttgagccatcatacaaaaatctagtgatttctcattctctatacaaaaaccagaagatctgggccacaaggtctgcattttccccagtatcagtctgctatggccccatattagctgcctagggcccctcactcctgctcctgctagaccctgtggatatttgagtcatgaccttgcctcaaggcttattcatgtattatttgtttatttattgttaacataggaagggtcttgctctgttgcccaggctggagtgcagtggcacaatcataactcactgcagccttgaactcctgggctcaagtgatgctcctgttaaggcatatttagatgggaggaaacatctttcttcctttagagcatctaattattggcatggccctggacaaattatcctagagcctggagcctcaatttgctcatctctgtaaggggggtgacaatgcaacctcatagggtggttgtgagtactacatagaaaaagactccagaaggagcacagggcctccattgggagcccctcagccaacactccctccttgctgcctgcacagcctcaagagaacatggagtcctttgggatgctgaaaactgtaaggaagacaactgtgcattctctgtgtaagcagtgtgcacactgtcttcctcctaaatggctagttggaggagtgaagacagactcactcagaaatgggtgattccctggctgcagtctcctctctgataacaaaggactgggcccagattagagacgaggcaggaattatgtgctgcagaaaggcggtggggacatcttgagtttgtttgtagctaatctcaaataattcaggtcttttccatttgcagcaaatctgattccctcaacacatctgtggtaaaatgttatgagtgcatgcggagaccaagtgtggaggggatttttttttccaccaccaaatccatagttaccctccaagttgtaatcttatcatatttaactggttccacataaacagatctatgtatattttcagtagtttcagctgaaacctgttaagaacagatgtgccaatggttccctggcactgatccatttaaatatattttttccacgaacaggtttttctctctccctttccttagaggggagaaaaaatatgaaagtggaaccaccattaaagtggatattacatgcttctgtgttctctgcaaccagtgtttgccattggttttccaacagcaatttggcacatgaggctatgaacacagagtgtgcatttgatggacagtatttgctctgagactgtgtggctgggagaatgggctgagagctctgtagttgctacctaagctagggtcagccagggttagtttttccctgctgctgctgctaagcagcccctgggcaaaggcttcagcaggccgtctgcctctttgagcctttagtttttcagttgcaaacaaaaaaaaaaaggtccagggagtgggaagataaagaactcctataactcagcaacaacaacctgattagaaaatgggcaaaggacttagatagatatttctacaaagatgatatatattaataaatggccaaaaagcatgtgaaaagatgactggcatcactaatgattagagaaaagcaaataaaaactaaaatgagacatcacccccacaccattagaatggctaatagcaataaaacggaaaatatcaagtgttggcaaggttgtggggaaattggaacccttctgcacttttggtgggaatatgaaatgctacagccactgtggaaaacaggatggcagttcttcaaaaaatcacaaatagaacaaccatatgacccagaagttccacttctaggtgtgtattaaaaaaaattgaaagcaagatctcaaataaatatttgcacatccttattccaatatagcagcattgtttgccatatccaaaaggtagaaacaacccgagtgtttacagatggatgaataaacaaaatgtggtctatacatacagtggaatattattcagccttaaaaggaaaagaaacagtgctatatgctacagtatggaagaacctggaaggctttatgctaagcgactgaagccagacaaaaaaggacaaatacactatagttccacttatatgaggtacctagagtagtccactgcatagagatggaaagcagaatggtgcgctaggcacggtggctcacgcctataatcctagccctttgggaggccgaggcaggcagatcacttgaggtcaagagttcgagaccagcctggccaacatagtgaaacccctctctactaaaaatacaaaaattagccaggtgtggtggtgtgcacctataatcccagctactcgggaggctgaggtataagaatcggttgaacccaggaggcagaagtggtggtgagctgagatcgcaccactgcactccagcctgggtgatagagactctgtctcaaaaaagaatggtggcttccaggactggggaatggagagttgtttaatgcctaagaatttcagttttgggggatgaaatgagttttggagattggtcacataacaatgtgaatgtacataacactactgaactgtacacttaaaatggttaagattgttgaaaagaagaaaataggggagagggtctaatttgtgacaccaacctcatcgatgggggaaggattcaaaagagaggtgcacattcagccagacactgagcctgttgcccgtggggattatgcctaagaggaatgagataggaggggttatgttttctcagctttgaatttctttctcaagaacactcctctgtccaccttcccattgcccacacgacagagttcaccaggcctcctagctctctaccagcctatagccatctgcaggaatgtcctcactgggccctttgggccatgccctgtgtctgtgactctggggcctagcactctgacccactggcctgtgttcctctctggttggaagacagtgcaaaagggacctattccaccttcagtggcctccgagtaacccacctgctccagtctgcagatttccatctcactgactttgccctggcactgggaggggggacgtgagggctgcaggtaggagtttgatggcagatgagcctcaggggttcaatgtcagctgggagaagcaaggccacttccagactcagttctgccactgtctggcagtgaggctctgggcaaaccattttgttttgtctctggtaaaagaaggctgtgggcaggattgggctttgtaattgccaaagattccagatctttgaggggctctgtcttcctaaattctgtgcagcctgctagcctctgcaggacagtatcagggaaacttaacatgcctgtgtttcgtagtgaacaggatatctagggttgagaattactgcgaacactgttatgttgtcacgtgagctggggctccatggtgatgcaccctgggctcccagaacaatgtgaagcactgagatgccctgcacctgggcctgggtcagaatcctggtagaggggtctttggcaaggacaggagaggacctccttgggattggactcagctgagcagcaggatgcctggttggcttgggaggtgagattagcttcctgggggcaaaaaggagccatatttgtcttaatgaggagaaaagagcaaaatcaaagcattcaaagaggataaaagaacacttcaaagaggataaaagaacatgttcagttcacaattactgcctccctaaccaggcaagtgtatgatggagaatcctgttatcctaattcaagaggacaatgccaaaggcttctcttgctggctgagaattgttggggagctccctgcccacggagggcctgtttgccagatccccagccccctgcagacctctgatctgtgaggagctggttctagtgattcacacttgcttgtgaaaaccttgatcttcatcaagcttttaaaaaaatctcatccgtattttttcccaattattttcctgcctgctcttttttttttcaaaagtaaacactcaaaagccttcatttctataactaattctggagtttacagaagcaaaaatcaataggctcaaaactccattcctttattcacttggctcagactggcttggggcagcacctctgagcccaagccagaaattgccaaaagggggttcctgtcggaatcttggagctcatcccccaaacttgagattactgagcaagtgagcaagatgtctctgtctggtccaggaagatgtcagccccacactgcccctcccagataaagagatcaacacgggacaggtcagtctctcccattctgtctccacctttgccagtctgcttctagatccccttcatgtactcatgttgctgccctccattcactagattttcaggatctatttatatccatccaccacatccaccactctgttttccaaatattatcacaatcagcgcagtagtgcttccccccgaaagactggcagctctctgacctttcttttcagctacaaatgaaaggggacttaaaagctgtgtgtgcatgtgtgtgcacacgcctgactaatggacacactcctcatgaaaaacaggataaattacagagaatggcaaagtaatgattacagaaaggtatatgaggcagaacccattagtgagctgcattttgttcaaaaccgagatactggcaggcagaataacatgcctttgtaccagaacgcattcagctgtagcaatgactaataaagtagcgaggatctgtgcacattttcccccttttgtgcctattttcataagttaataactcaagcatgaaaattgttttaaggctgaagactggtggtaagatctggtcaaactgtgtgggaaacaacttttgttgttgttgttacttaatttagtttggctgtttttaagttagaggagtggaaatgtcaatgtcaatgtgagtcttgcaatgtgtttttgttaagcccaagagcatttgggattgcatcatacaaagcacatttttaatgactagagatcatagtttctcttcctacaggtgtatgttcctatttggtacaggttgggattgttggggagggaggaggagatggaagcaaaatcttataaatgacatcatcctgggcttacccttcttcagctagaaaattcctattccaccagcaaatcagcctggtgagcaaacagctgccttagacaaatggggttgagtgtaggggtgaaacctgctgcaggattttagtaaattctcagagcaatggaaggaacagaaatatcatgaataattgtcatacctctcattcctacaggactcaggttttgtgagcattttcctgtccatagaaccagagaaagtctaagttaagggtaccagattttgcataactcctctttcttcttgccttttattttctttttattggatgagaagactttgaaagacacagaaaaacacagagaataacataaatacctgtgtagccacattctaggagtaacaactgtaatattttataatgcttactgcaatttattttttaaaaataaaataactgaagcattactgataaagatgtatcatctcctttatctcacagacaagcaaagtggatcagcaaaggctgcagtcaccagcatcttttccaaccttaatgaactgtatcctcaaaagaacactatcagactggtaagacaagcattattgtcccacttcacagatgaagagcttgggggccctgtggatgtgtaggagagtcggccttcctttttataggccttttgctgagctcagaggacagagcagaagacaaagccgaaagcagccctaagcagacactatcccagcccaaggagctatgcagacagctcctgcctagaggagaaacaattctctccttcagccaggcatgtggcacagaggtgaacaggaaatgcttagggagacagttcacagatatatatgtacttcacagggcacaatttaatccataaatcaatcatggatcactgctaaagaaaacaaaatatgctgccactaatttgccaccaccctgtgagcatgattggatgatgtttattttgattaggagattgctccatttataaatcttcaatacatcctgtccccctaaaacggcatctggatcttttgagggttaaaaaaaaaaaaagtgaaattggatgagggatgagagctggacttctgtgtgtcccggggtctctggatccacagcctggtgcctagcatcagttaagcccacgctggggtcgcatcacatcccgcaaagccacgtgctctgtgaggccaacaggagccccgccgggtggaccagctggaatctcagagagcgccgactctgaaaatacccggctctgcagaagcacgctgggcccagggggcttctagactgacagctccatttatcaactacctattggttttaaaaattggagtgtcttttccgcgttgactgattttggctctaagagatgtcgctggtcatttcagagtgactgaacctcccctctaacagatcccgggaattgttttcaggaaaggtaaaaggcagccttttctgtcacaacacaacgctgagccggcagcctggctctgtcaggatctggggctccagcgcccgagaagcccagcctcgccggcggccaagttcaccgcgaggccacgcgctgcctgcgctgcgctcccggacccgcaccgaccgcagcgcgcgccgccggtgcttctcccaccccagcctggaagctgcctccctccgcctatccctgcaggataagaagcccgaggaggcggagcatggaactcgacagttaaaacatttaagagagaaaacctagtgtcttgctggcctgaaatcgagtacgcagcccggggtgatcagggtctcccggcccggatgtgtgagacttgcttcccctgggcaataggcgatacgatgctttaggaggaaggtatctctccctcctaagccccggaggggagaacttccaaagacagaaaaccacagggttcctggcacagagctttccctttatcagctaaagcagaatcttttctggccttaacctggccccttcctctaactgtaggcagagaggcagacagaaaagcacttgctgaaacacaaagttttgttctgtcctcaacgaactgtctagagttgattgctgatagtcgtggtgcattatgccttcctggttttcatttaattgggcaccacgctgcctttcaagacgccttaaaggaaccaacaaccaaatccaagagagctggacagaccattgaacacacagtaggctgtgtctcgtggctttcgttgtctggtgcctcaaagaaaacaccagaaagattgtttctaagctagagccaccccagattgcttaaagtgcaaagctcactgctgttgggggtacccttgtgagacactggaaagctggttttaccgtggccctatgaagaggaagactgaaatttagacagtaatacctttactaggattggaaaagatttggttaatgacagccctgttatttctaaaacccattatcactgtatgagagattcctttgcgctgcatcctcgacagtgcttcctaaggtccgtcttttctattgtattcattttaatgggtgcatagccgtatctcgttgtgattttaatgtgcatctccctagtgactaataatgatgggacgcttttcatatacttgtttgtcattcataactcttccttggtgaaatgtctgtttagatattttgtccattttttttatttggattgtttgatttcttattattgagttttgggagttctttatgtattgtggatacaagttccttattaggtgtatgatttgcaaatattttcttcaagcctgtagcttgttctttcattttcttaacaatgtcttttgtttttaatttcaaagaaatccaatttgtcaatattttcttttacagattatgcttttgatgtaagaaatctttgcctaacctaagtcacaacaatattctcctagaagctgtagaaatttcaatctgtaatgatcaattttgaactcgtttttatatttatttatttatttattctttgagatggagtctcactctgtcgcccaggctggagtgcaatggcactatcttggctcactgcaacttccacttcccaggttcaagcgattctcctgtctcagcttcctgagtagctgggattacaggtgtgtgccatcacgcccggctaattttttgtattttagtagagacagagttccaccatgttgcccaggctggtttcgaattcctgagctcaggccatccacccgcctcggcctcccaaggtgctaggattgcaggcgtgagccaccatgcccgacccagaacttatttttaaatatggtgtgaggcatggagcaaagtttacttttttacatgtgtttacccaattgttccctcaacatttgttgaaaagacatttctccactgcattgttttatgtctttgtcgaaaatcagtgtatttttggactcttgattctaacgttccattgatgtttgtcttgatttatttttttggccttgaaacaacaatttattttcatctctcatgatattggaggttggccaggttcagctgggcaattcttacttgggttctctcatgcatttgcagttggatgatggctggagcagcaatctggaggctcaaggaggctgaaggccacatatgactccttcatttccatatctagcacctcagtggagtaggctggaacagctggggaatgattgagcttctaattctctccctacctcctatctatgtgtctagttttcacttcttcacagtacggcattctcaggaaagtcagacttcttagtagtggcttaccctagaatgacttttccaaaagcacatgtttcaagagacccaggcagaagctgcaaagtttcctgtgacctagcttacacatcctatagtttcttttgccatattctgtaaggaaagcaagttgctatggccagaccaggttgaaggagaagggtatgagactctacctctcgatttcaggagcattattacggagagggaaggattgttggttgcttctgtataagcaatgccaataatagaaggctccactgtcctgattaatgtagctttataacaagtctcaaaatcaagcaatgttagtccttcaactttgttcttcctttacaaagttgttttgactgtgctaggtcccttccatttacattcgaattttagaatcagtttgtcaatttctaccaaaaagaaagcccttatgaaattttgatcaagattgcattgaatttatggatcaatttaatgagaacttacaattcaaattattttaagatcaatttggtgaaaatttacaccttaaaaatattgagtcttttgacctatgaacctacttaggttttctttaatttattttagcaattacattataattctcaatgtatagatctttctatcttttatcacatttgccctattttatacgttttgacccattataaatggtatttttaaaatttcaatttccggttgttctttgcaagtatatagaaacataattgatttctgtacattagccttatattctatatttttgctaaagtcacatttttagttctagtagtctttttttcataggattttctgcatacacactcatgtcatctacaaataaagatggcttttcttctttatttccaatctcaatctcttttgtttccatttcttgctgttgcactggatagcaccttcagtacaatgttgaatttgtgagagtttctgatcttaagaggaaaacactcagtctttcaccattaagaatgatgttacctataggcttttcatagatgttcccttagcaggttgaagaagtttccatctattcttagtttgctagactttttatcaggaacgtttgctgagttttatcaaatttttttctgcatctattgagacatgcaatcttctagtgccatcattttacaagctcaagtgaagtgtagggcacttacctttctttacgtcctactatcctctctgtttataatataattgcttaaatattttctctgcatatatttaggatcacattagatagttataatttttacttcaactgtcaacataatttagaaaagtccagtgaagaaggaaagtctattatacataccaatatttttgcttactattatgttaatatgttctttcttccttactgatgctccaatattccttcctttactgtttgctttttgtttagaaaacttttttttagctgttcatttatagtatgtctgctggtgacagatacttttagttttccctctcctgagaatgcctttatttccattttattcctgaaggacctgtgattggggtggggctgtggtattttaagtggtgtttggctagagtggagcggttattgcccaaagcttttctgtcttgctgggctgccactgtccagctccttaggctggagagagcaggcttttgttggggccttcttggtctcatttggaatttctgagttcagtttcttcaactatatatctgggatatacaagacagaaagaaaccagggcactctccaccatgttgttcctccagtctcaagatctctagacagtctgtcttctctccatctttcagagtcttcttgtgcatgttttttatataacatctacactttttagtggcgcttagcagaagcaatgggacaagtatgtctactgcagctttctggaagagaagctcctcatttctttttttggatacatttcaaaagaagttgcaaatatatgaccctacacatttcagtatgcatatcattaactacagctcaacattagtttatatttttctttttcttgtgtgagatgaaaactatacatacattgccatcaggctttgcccaggcatcagaactcactagacagcagaatatacatctttgagaggaaccacagaaatgtaatgtgcatgctaaggcttttacctgaacatcaaaatggaaacatcagagtattcatattagagagcaaccttacaattataatggatgtggtaaggctttttaaaaaatcaatgttcaaagacatagaatcaaccaaaatggccatcagtgatagactggataaagaaaacgtggtacatatacaccatgggatactatgcagccgtagaaaggaacgagatcatgtccgttgcagggacatggatggagctggaagccattatcctcagaaaactaacccaggaacagaaaagcaaacaccacatgttctcactcataagtgggagctgaacactgagaacacatggaaccagggagaggaacaacacacactgaggcctgccactgcaggtgggggttcaggggagggagagcatcaggaaaatagctaatgcatgtcaggcttaataagtaggtgattggctgataggtgcagcaaactgccatggcacacgtttacctatgtaacaaacctacaaatactacacatgtaccccagaactaaaagtaaaataaaagaaaacaaatttcaaaaaataaaaagaaaattctaggtacattgaaatatgcaattcttacgtgcaccatttgatgagtaccacccacccctctgtcaagatacagaactcatccatcaccccacaagttccttcttcctccttcacagtctaatcccttccccagccacctcgcggggacaaacattgttttgttttgtttttttacacctcctagattagtttcatcttttctagaatgcagtatgaatagaagggatatcatgcactcttttctgtctggcttctttgtttcagcctaatgtttttcatatttagcaagttttataagtcatttgtttctgttgctgagtagtattccgttgtgtgcatataccacagcttgttgatccattcttctattgatggatatctgagctgtttccaggttttggctagtatgaataaagccaaagagagccattttaatttggggcatttaaaaaatggtgtgaataaactttcatctgaacacagggttccgtggtaataatgtttgaaaatatcacctccagctctgacgtgccgagtttgtaattttcgtaaatgatataaaaagtcatttcttcatccattcatttgttcactcaacccttatttagtgggcctattccctgtgccaggaatcattcaaggctcagtggggaagagaacaaatgtaagtaagtcggcctggtgcagttgacatgctagtgagggaaaagacaaaaacatcagttagtgaatacctgttatgacggaaaagaagccaggtaagtgggtagggcattacagttggtccagaggtagtcagggtgtcattttagctctggaagtagggagaggaacttagggagatggtcaggggagggacttatatgatttggatctgtgtccccactcaaatctcacaccaaattataatccccaatgctggaggtggggcctggtgggaggtgattggatcatgggggcagtttcttatgctttaacaacatcccccttggtgttgtcacagtgacagtaagttatcacaagatctggttgtttaaaagtgtgtagcatgtccctctgtctctcttcctcctgctctggtcatgtgaagatgcctgctctggctttgcattctgccatgagaaaaagtttcctgaggactccccagccatgcttcctgtacagcctgtaaaactgtgagccaattaaacctattttctttataaattacccagtctcaggcatttccttatagcaatgtgagaataaactaatacagaaaattggtaccaagagtggggtattaccataatgatactgaaaatgtggaagcagctttagaactgggtaatgggcagaggttggaggagtttggaggactcagaagaagaagggaagatgaaggaaaatttggaactttctagagacttgttaaattgttatgaccaaaatgctggtagtgatatgaagagtaaagtctaggctgatgaagtctcagatggaaatgagggacttattggaaactggagcaaggtcacttttgttatgcattagcaagaggttggctgcattgtgcccctgctttagggatctgtggaactttgaacttgagagtcatgatttagggtatctggcagaagaaatttctaagcagcaaagcattcaagatgtagcctggctgtttctaataacctatgcttatttgcatgaacaaagaaatgatctgaaattggaacttacatttaaaagggaagcagagcatagaagtttggaaacttgcagcctggccatgtggtagaaaagaaaaacccattttcagggggaggaattcatgcaggttgcagaaatttacataactaaaaagaaggcaagtactaatagccaagacaatgggaaaaaggccctgaagtcatttcagagagcttcatggcagcccgtcccatcataggcccagaggcccaggagggaagaatagtttcaggggccagaaccagggtctctactcccctgcacagctttgggacactgtttcctgcatcccagctgctacagctccagctgtggccaagagagcccaaggtacagctctggatgctgttccagtgggtgcaagccataagccttgatgactttcatgaggtgttaagcctgtgggtgcacatagtttaaaagttgaggcttagaagcctccacctagatttcagagaatgtatggaaaaacctggatgtccaggcagaagcatgctacagggttggagccctcatggagatcctctactagagcagtgcagaggggaaatgtagggttggaccccccacacagagtcttctttagggcactacgtagtagtgctgtgagaagagggccaccattctccagaccccagaatggtagagccacaagcagcttgcaccctgtgcctggaagagccataggcactcaatgccagtccatgagagcagctgtgggggttgaaccttgcaaagtcacagtggccaagctgcccatggctttgggagcccaccccttgcaccagcatattctggatgtgggacatggagccaaaggataatattttggagctttaaggtttaatgactaccctgctgggttttggacttgcatggggcctgtagcctctttcttttggctgatttctcccttttggaaagggtatatttacccaatgcttataccgccattgtatcttggaagtaactaacttcttttttattttacaggctcataggtagaaaggacttgctttgtctcagatgagactttggactttaaacttttgagttaatgctgaaatgagttaaaagactttgagggactgttgggaaggcatgattgtattttgcaatgtgagaaggacatgagatttggggaggagccagggtcagaatgatatggtttggatatgtgtccccacccaaatcttatgttgaactgtaatccctagtgttggaggtgggacctggtgggaggtgattggatcatgggggtggtttcttatggcttaacaccagcccccttggtattgccatagtaagagtaagttatcacaagatctggttgtttaaaagtgtgtagcaccttccccctctctctcttcctcctgctctggctatgtgaagatacctgctctggctttgtcttctgtcatgagtaagtttcctgaggcctccctagccatgcttcttgtatagcctgtagaactgtgagccaattaaatctcttttctttacaaattactcagtctcaggcatttctttacagcaatgtgagagtggactaatacagggaccttttaagaggaagtcataggagagtttttggagaaggtaaggttggaagaaggtacaaagaaaaaagcttatgtctttaaatcatcttcattcctgataattcagcacactttagaggcaacttccaagtcagctgttgatggtagtgaagacccaaggcccagagagggagcaactggccctagagttgcatgatgagtcttcagtggcaaggccgagattagaggtctgtactcagcattcagctattggtggacagaactcgtcctttgcttcctaagtgcggcttcagtcctgtcatggccctgcacttccccgattccctgcccactccgtccccacttcttcaggtgcttccccatgggaactggtagaatagtgttagaaagccacatccatagtatggcctcttgaggatttctggtttgtgtgactttgagcaagtcctcccctgatgttggaggattcttacccctgaagttggggaaggagtgaaatcttgatggtaggacatccgctcacatgtcctttgagacttaccacgtttgtcaccatgtatttagcacagctgcctttcatctgcgaatacagcctgggagctctttatgttttatctaatttaattcttataacaatcccatggagttgttaggtagtaaagtgctctctctgtttttacagatggaaatctggagactgagtgaggttgagtaatttgcccgaggttggcaagaggctaaagtagaattctaaaccagatctgtttgattctgatgctcttgcttttagccacaatgttttagcatctgttcaattctgaacagacggacagaatttgcagaggtcagagggaggttctagaataaagctgttctctagtttacaggacagaaatggtggtagtgatatgcctgtgccagttctgggatgtgcagctgggagggaagccttctgtggaccaccatgtaggagggagagcatagcagggtatgatgggaggagcatgggttctggaattgaaaaatcctgtgttcaaatccacactctaccacaaatcccacgaatggaggacatttggacaaattgttgaagccctctaagcttccattttcatgtctgtaaaacgggataataatggtatctccctagagggttgctgggtaggtacaatgagatgatgcaaataaagtacttagacaataccaggctcacagtaaatgcctaataaatgctggctgttgtttttattcgctattgttttgaaaaatggcaggcactacagacatacaaagtgcagagagtggaaagacaacaatgtgttttagggccaggcagcccagagctgcccaggctggcaccctgcccagaagtgggagtgatctagcagaggccagggccttgcaggaggatttttgcagacacccaacttcctgcatcagtggggtcgagtgatctctggagtgccttccgacctggagaggtcatttcaagtctctgcaacggtagcgatggtagctccagcaagggagggagaaggggcttccactggctcttggacactccagctgtcatttttgggaatgtgcttatctgccccagagggaaatagatgattgagaaaggaggcaaccaggggacttaggctttaccagcagtgacctactagctccggtgtgtctgcctcagacagcaggccaaggctagtgtcacggcagtttagggggtcctgcacattcactgtgccaacgagcggtattttgcaaacttattataaacagattatatttcttatcctaatgtggctgttggctacctgcccatgaattttagcctccaggagaaaaacaattgcttgagctgagtgttctgtgcttttactttccatacattactcagggctccttccagttcccccaacccttaatctctctctttctctctctctctcgctttcattctctctctctctccatctttttccttcttttcagaaagtcctctttcatcttgggcataactagaaaatctgtaagctgtgctttctgccatgcattagccaacagggtcctttcctcccaagccagggaagaaagcacaaaaaccaatgtccaggctgggcctctcagggtccacagcatcacaggcaaaggaagtaactgtctccatgcctaccaacggatccacacacatctcgctgggcagcatctctgccccaggaagcagcgcgcttactacactgggcacccagatgtctggtcttgcgtggcaggcagccactttctcctggccttttcttgtcccaaaagtcagaggggcaggccagttccagaatgggattccaggcagaccaggagactaggagtgcatgtgaacaactgcaaggggatgcgtctgtctgcctggtgtccgtgtgttcatgtgcacacctgtgcacgcgctcccccagacttacacactcgtgaacacatgctcacacaagttcatgcacgggagtagctccaagcctctcactcagcactttgctattaatagctcacttttctaaaaaagtctgcttagccgtttgtaagaataaccaccactgcctgtgtgacagcccaggcccccgcagggaggacagggccggccctctgctaggactgcctgactgcctgcctcatgttagaatccagagggagggccaagaggggagatgaaaacccctcctgagtggccagggcagcctccagtgcctgtgcccagggacaaggcaactcactggtaatgtctgcgggcaattggccaggcccctgagagccaagatgccaccttcttcatggtgacagcagggagcatgctccatgaaaccagaatgagcctgttctccactctggggtcctgctgtaaaagccaagaagcagagagccaagctgagcccaccaagagcttggcacgaggctgtcacccacaacttctcgctgatccaaaagacaggctctgaggctggaaattcaagtgtggtggtgctgtgacacagcacacagccaccgtgcacttgtgtccctggcagccgcaatccgggcctgagagggcccagtgtctgtgggtgtttgtatttaattgcagtggggtgagaaaggccaatggttgggttttatttcaaacctgctttgaggagaagtaacattaggtggcccagagctgtgaaatgtgtcctggtcataaatgcctcaccatcaattaacacctccagaatacctaagagttgccagcaacttcccattcaaataacctcttaaaccttcctccacaccacactgcccattccctcgcaggcagacctgcatggtttgatgacgactggtcacactgctggccctatctgtataaaagtccagacagttgggctgtgaggggaaatgcctacctcagagtagcttaagaaagaaagatattggtttacttctgaaaagctcaagaccagctgagtttaatggcatcattaaactcattagacatggggctgggaagtggctgccagcagtttggtgcacagcctgtcctctcagcagcccaggtggcaggtgtcttgggagtggcaatgatgagaccagctgctcatcctgggctggtcattgtgactcagatgtggagtgggctggttagtggttctgggccacttgtccatctctggatctggcagctccatctacacagtgtcgggctaggcatgggagcattctgggccaggagaaaggggattggatcctggatggtgggaaccgcaggtgtccccctccacgtgcctgggtccaagactgctctgctctggaccttctacgccttcagaggtacaagttgcagtgctacccttgctgaacctacaaccctgttcaagtgacaacttctctgagtctcatacgaggatattgaaagaaccttctgcacagggctgttgtgaggattaaccgtaataatacaagaatatctggcacttgcattcagcaactcaccgcttacttgttcaaccaggtaaaaaggttctgatcccagtgttgcaggacagaaagacctccccctctgtagctgcagatgtgacccagcacagaaaaaatggcaggtgaaagacaggcaggaagagcaactaagaaggtgggaggcacctccataagatgcctgaggccatggggatgaccgttcacagagctagtccctcgagcaatgtgttaaatctactgaactgtgataaagcaacttctgggtgaattttgtcctgctacaagttgtcatggaatggcaaggtggcagatctcagaagtggatccaatggtttttttttagttaaagcagaacattcctggggatggtgtcaaactcccttccatactgttgagtctgctgatgattacactggcttctcctctttgccccatcatttcacaggttcccatcttaaagaggaagagaaaggaaggagggaacgaaggaagggagggagggagggagggaggaaggaaggaaggaaggaaggaaggaaggaaggatggaaggaaggaaggaaggaaagggagagagggagggaagaagagagggaaggaagttatcaaacccaagctctgtgcagagcaggagacgtttccatgggacccctagaatagataggttcttgctgctctcctggtggatggagatgcccaccagtagctgtgagagtctccccgaaggcctgattgtggctccaagttccgtaggactcactagtctttttttccctagagggtcttgccattgagaggcaggtgatgtgctgtttcagaaaacaaaattgggacatgtcctgatatgacatccatcaaatatatacagataggtgtcacagcccccgaaaaagcttatctcttctaggccacacatagctatttcctccaactgtgtcagacattacaaagtttctagcaatcaaaacaagtcaaatgccattctcaggacccgttggaggattttttgctttgttttggctttgtacggtatccataccattttccaaattcttttgtccttacatattttgtttttcttaaaaaaaaaaaaatcacctataatcccatcaccagacaaaaccactagaaagaaaccaacattttagccatgtttttctgtatataaaaaaagtgtgtgtggaatttttcataacaatattgggaccatgacatctatcacattttttattaggaaatggccttcaacaatatgcatttaacaatatgcttgatgtctgtgtaatatttcatctaacaaatatatcatgatttatttaagtattccctgattgcttgcttctaactagaaaaaacaatttttctaagtgtcaccactgggttagagtaatctcagccaatcctcctaatagcactgtgagaccagagttatgataatcttcagttaatggacaagggacatgatggtgtggaaggataaataaactacccaaagacaactagctagtgagaccagcatggacagtcaagcccagtgcatgtaatctgtgctcccctgcactgttgctcatatacttggacccttgcatacatgattttcttattcatcttgaaagagaaatgttagcttactgtttttatttgcatttatttcgttgcttttgagtttgagcatctttccatttcttatagaccatttgcatttgttttcctacaaaatgcctgttcatggcttttgcccatttttctgttagccttgtcctatgtatacacacatgtatattattagttcactatctgtcaggtaaattccccagttttcttcttgccttttaatgttgttatggtcatttaggactagaaagttttaaatcttgtatgcctatcagtattttactgtgtgactattcccattatttttatgcttagaaagttttcattcctatcaagtatagataaatgttcagttctactattttattttaactgtgcagtgggttcatttttggcattgaattaattaatctatctggatgttatcattagtttccttctgaaaaagtcagtccaggctgggtgtggtgactcacacctgtaatcccagcactttggaaggcctgagtccaggagttcaagaaccagcctgagcaacatggcaaaactgtgtctctatcaaaaatacaaaaattagctgggagtggtggcacatgcctgtgttcttagctactcaggaggataaagtgggaggattgctggggcctaggaagttgaggctgcagtgagccatgattgcacccctgcactccagcctcggtgacagagcaagaccctgtctcaaaaaaaaaaaaaaatgcagtccagatgtactggaacaagcttgtgtgggatggctacactcctttcctgttccaacacacctgttacctggatgagctcctatatccttatccaggtaccagatctgccacacctggtaccggcatgagccctgtggggaacataccagcagagacattatacttccaccgagacaaaataaagccacattgacttttagtactcatattattgactgacattaaacccatggcaactaaaatctcgttgttgttttttttttattctgggggtgagggtacaacttttagagaaagtatctctccctaagactgccaatcactctaaatttgcatctaacacttctacataactttatctaccgagtaggcagtatttaccgtctgctgtttcatcttgtagcataattttcttttatatttccaggtgtgaaaatattcaaactgacccctaattctcagctttcagagctatctgctacttcccaggtcactttggtttttaagcgctttcacatgctgttgttggacatctgggttattcccaaatcttgttttcacgtaggcagctgtcaagtcaagatagccatggccctgcctgacatgttctttaagattgcattttatttttattattttattttatttttcttggagacaagagtttcactctgttgcccaggctggagtacagtggcatgatcttggcttactgcaacagatcttgacttactgtaacctccgagtcccaagttcaaatgattctcctgcctcagcctcctgagtagctgggattacaggcaccagccactatgcctggctaatttttgtatttttagtagagatggggtttcaccatgttggccaggctggtcttgaactgctgacctcaggggatccacccagcttggcctcccaaagtgctgggattacagatgtaagccactgtgccaggctgcatttttaatactgtgtttttcttgacatatattccaactaaattcttctgggtgttgttggtttgacctcatattcggtcctattgaaatgaatttgaatcattcatgatttggttatttattgcattcattgtccttctcagcttctggttacccacacattagacacaagtgcctttggcatcttttttcaaatctacagatgaggaaactgaatcccagaatggtggagtgatttgacgaatattgcaaaactataatggggagatgagatggggatccaagtcttgtgcccccaaagacagggcaccaggcagcgtagaggtggccagtaccagagcaacagcctaacaatggtatgtatgtcacacacccagctcactcaatcctgaccacaaccccccactgctctgattcctgccccatcagtagcgtctgaaaggacatctccaagttcaccttcaaggacactgttaaggctgggccagtagaaggaatatgacccctggcactgtcccccttcataagacttcaaagttcatcatttcatttgggcatcattttacaatttgctaggaatccctcttatcttattttcatctggtccatattcctccgtttcaaaaacaagactatcctgaaaaactgtcagctgcttgctgaggttatttttggtatacagtacttaccagagtcacctggtcagcattaatcaccccatcatgaaagatttatggttgtttggggggtactgaacccatgttgtaccctatgttttttctgaaatattttcaatctagatggtcagtagttctagaatattccctcagggattgccatcgacaattgaccatttttataaatgttagaaatggaccgtttgcccaggagagggcttccctgtgttgagtttctgtgttgctgccaggtcatcgaagagttttcattgttaaacttgtgtagggcatccaagcaccaccttgctgtcttctcaccaggccaggggtccaccttttggaagagcatctttctaactagaagagagagacgtgaagttgaaattacttggctctgcctccttttttttttttttctcaagtttctacattttagcatctttcctgtgtaatccctttcttgtcccactcttcaaatagctttgaaaacccttctgagatcacgggcctattttcagcctctgcttggtgtgggcttttggtttcccagtgtggttctcacaggttcaggcccccccaaccccggtattgactccatgtcaacttctcatcttctgggtatgcctttctgaaagtctgagatcaccagtggtaccctgtgtggcccacactggatttttctaactatttcctctttttggtcctcactgggcttattcaggattattgacgatacatatgcagaatttggggttttctcctaatctcttttctcacttgggatctgtgtgtgttcagactccctagccccagccctccaggttaatattgtgtggcactaggacattagcctcagtttcttcaatttgatataattgtgtatgataacagaatttacctcctggagttgttatgaggattgaaggaaatagtgcttagttgtggttagtattaatattattatctacctattactgacacactttgtggttataagtgacagaaaactacctcaaactggcttaaacacgaaaagagaatctgttgctcagagaagtttcccctaggaattaccatcaagcaacatccaaaggtagacctggctttcggcacagctgggttcacagccctggtaatgtcctcaggactcagttgtgtccatctggttcctctgacgctctgtgtggaaggaggaggtggcgcagcagcagcctccagcttggcatagccatggtggggagcaggaccccagcgcttaggtttggctcctatctcagcaaactggtgctctgccaaactgaatttggaagacttgctttcccagagaagagagcacatgagccttcctgactgcgagtgatattgctgacacaaactggacacttcctccactctgtagctaaggggcagctgggcctttcaatgcagctcttttctagcaagggagaccccaccagaattgagatgggtaaccccgagccctgtgcacaggtgcctgcttttattccctcattcatctcggtctgaacattcctgaccttgactcttgcctgcgacatcctctgcactcctccacatgctccactcagctcgctcctgagagctggtaattaatcggccttgtctttaccctctgaccccactgagcctcccagatgggtttccacacctggcaaatgaccttggagttactcctaactttgtcccacaggcctgctggattggatttaatgtttgcttgctaacttctctgactcttgacctggtctggtcacttgctgtggttgtgtgtgacacctctgtgttatacacagtgccgggcattgctttttcagcagcctggaatccactgcctcttctttccccaattcgatgtccttttgtggcactactctctcactgggcgccgtcttcatggtaaatccaggtgcttttccccctgcgtggaagtggaaagttgtccacagtgtctcctcccttgccccagggtggtcctgagctgagctgagctgagtggtctcagggggagggacagcaggctgtttgttccctgtagaggcgcttgatggtggagcgctcttgtcccagttgaacctggttctccagctcagaatccagcacccctgttgacctcacaagctccttcatagcttccaattcattcccctccctgcttgagtcagcaagggtcgttccttctgctttcaagagtcctagctcatattcctgtgctgtgctctatcttccctggctttatagatttacttgggctcttttcactcctccctctgaagttaccaattgcactttttctggtctcatgggctggcctcctgcagcatgctctgctcttcccagctttgggccagcacttcctgcttcctgccaggcccccgctgttctgaggtggatctgggctgcagtccaggagacaaaattctccactgtgacaccatctacatgcccagatgttccctccatgtacttcctctttctccttttcttttccaaactcacaaccttccagtgagagaaggaatgaaaacaccacctgtaacaccaattcctccaatttcctccccagaacttcaaagtaaacagaaatgtattgggcttagactgggacttatggatggtcagagttggaagaagccttagaaaccatcacaagcctttgctcccagggctgtctctgatcgtttggttgtggctgactgggttgtcacatctggacacaggaagaaaagtgctgggagtgattcccaatgtctgagtggatgagggaagggggagtgacagcatatgagctagttatttgcccgtcctttaacaatctgctctgtactttacaaaatggggaaactgagtcacacatctatcaagctgtctaaggccacacaggaagtcagggcagatttgggggtagaatccaggttgtccagccttctctatcaacaacaatgacttctctttcccattggaattcactgtcataggatgtcatctaagtccacttcctgacagcatgtgtgtctcccagtctgtgatgtcatgctatactcggccacctctgtacaggacagtgtggcacgaaagggatcctgctggtgcctgtggggctggggctaatactctgggacaactttcagaatcacagttcttctaccctaggacaagagggtggtatacagccaaggaaaggtggtcctgggctctgcagccatggagctccagggtttggaaggtgccgtggaatcttactccttagtttggacttttgtcaaactgcagctggaaaaaaattagaaattgctgctccaaatggaacatactccatttcattccaaatgagaagtaaacaaatagacgggtgagcctccccaaaatgataaaactcttcacacttaagatgagaagtcagttcaagtgcagtcctggcgtgactcactggggtttgctgcaggaagataggggcgaaatgtcctcatcctgcctatagaagccagctccttattttaaatcccatcctgcttgactatcaaagtcagacagagccttcctaaaagctgaaacacacgcacagaatgagaagtccctgcgggagcaagttcactgtggtgagaaccttgcagagcagacagctccaggggccagcggctgcctgcaaacacttgctgagcaagtccctgggagaggggcctttctcccaggccaggaacgccaaagtggggtttcctgataaggaacacagaactgctgtttcttggagagggagttcacacggactgggatccattctcaggctgggccttagtagtgggacagcatcctgttttattaaaagcctgttgctggcagggaaagccatctgcctgctgagtgggcaggggcccaagatcgctgtgggcaattccaagccagtactgggagctgacatcaaaccaggaaagaacacgactgtttttagctgatgtagcagtacattttctttctttccttctttcttttttttttttttaatagttctattgcccggtttcactgtgtacattttgtgtgtgcaggcatgcgtgtgacatcctgtacccagctacagccgaggttcactctgagatgagcccaccccacttattctccccttctccctcctttccccacctccccctcttccccatccttcccccactgacctccccagctctaaaacccctgatagacataaagaacagagggaaacccaggctgtaacctggggttattcacagggttggggtgggtgagagaagaaaaacagacttctttgtttatcttttgagtcttgaaattctaaaaaattcattcatttccaaggaagccttaatttgtaggattccaagaaatttaaaaaaagtaaagggagattcacttcaaaagaaactaggggaaaagctgttttcttttttagctgatttgttcattattcttattttatttaaagttaggtttgttgaaggcaggcaaaggtagtcactttttcatatttgtattacattcttactttcttcctccattgccttatcagttaagagggcaaataatatttcaagagactgatagaatatgttctgcactctgctcatttcatagctctctggggaattggggtttttataaacttttataatcacattttctgctgaggttatagatgactccaagaatcttccattcatgctgtaaattaaagtgactcaaattgcttccacttttacaaattaaaaaaaaatgtacttctatacagatttttaacaattaacaaaaggccattttaacgctctggttggttgcctgtacgtgatttttctggcttttcttaaaatttggagtgaacagctcccatgtcaaatataacatgttaacttattggcttctctttaaccctgcacacaaacaataaacttttcatgtagagccagaaaatggtatatgttgtgaacttttttttttttttaaagatagagtttgtggtgataaagggatttcagaaaaaaaaatgtacttgaaaatatgttacttcacattggaacattcaattttatcttaaggatataaatattcaattttaccacattaatctttgtactgagataagccaaaaataacgtaaactgacaattgtttgctatacattctaatattttacatatttataggagttttccaagtcatgagatatcatataaggcacacaaaaaaagaatgacataaatcatgttaagtgcagtctactttttcctgagctatatctttaagacaaaagatatttaacaaattgaacttgttttttgtgggagggtccactctctggttacttaagagaaaaccagaggattatcttcgtggtgaaggaaagtgtatagaaggcagtattttttttttctgttataaagggccagggctctatccgttggtgcagtgttctgccttttgtgtttttttctggttaatttaaaacattagctccaagtttttaatgtagtagtttcccgtgagtcactgggctgaaagcccatcctatctgtgtcaggcaagggtccaagacaagaaacaaggagaacacagatataagaaagctttattagtgcagctaaacattgataattaggaaagttccagttcttctatggtagtttatttgtagataaatgtagttgtaaccttttggtgccaaaggaaaaactcctcattcaagacaagggatacggaataggaagagctcaaagaaaacacagttttctgtgttacagacaagtatttacattactaatcaacttttggttcaggaaagaagtgataatctgtttagatttttaaaaggaattcaatatcctgttgactaaatgcagagcaggttcagaggaagacgactgttgaataatgcaattgattccttccaagaaagcatagggtgtagtttttattataggaagtgccatcgatagtactttttctgctttctggaaaatcacccaggaaataaaatttgttttaaacattatttttaaaacaggctctgccgacttccagttctggaacaagatggttaaactcatttttccctgctctgctcctctaaatacaactaagtaccttggaaactattcagcagacaatgataaagggctctgaaagctagaagaaaaggtgtacttgcaagaaacctcaggacttgagtaacagcaacatggtaagttttctaagttttcttttcgtctcccatatacgctgggctgtgctggaatcaccaacaggcacagaaaaaatgacaacaaaacaacaacaaaacccccaagaatatcctgttgtctttggccaaagttcaggaaaggggagccccaacagagacccagtaggaagctctagcccctgttttgtacaacccagggtccttgcagagagattgatctgccagcagtggcatcagcagcaatagtagcagcagcaaagccctggacagtcctggcccccagtccacaacttagacacagcacatggcctaattcacccacagaagcagccactgtgaagccctgtgtctccccagactccatccagtggcataaggagacccaggccctgcagcttcctccccatcatggaaggctgtccatctacagagtttccaaacataataagcactaaggaaacaacataacatgatatgccgaaaaaaaaaatcacaattaaatcaaaatgaaacatcaaaaaatgtccaagtaaaccacaggaaggcaagaaaaaagaaacaaaagtgtaataaacaaaaggatcaatcagagaacaaataataataaaatatcagacttagtcctaatatatcaataattatcttaaatgtaaatgttctaaatgcatccattaaaatgcagagattggcagagtgtattacaaaacatgacccagctatgtgttgtttacaagaaactcacttcaaattcaatgatataggtagactgacagcaaattgatggaaaaagttataacgtgtaaacattagtcagaaggaagcacaagtggctatgttaacatcagaaaaagcagacttcagagcaaagaaagttactataggcaaagagggaaattacataataacaaaaagaattaattcaccaagaagatgtagctctcctgttgtgatgttatgatatatgtcggttttcatccgtgggtcctggctcataactcccacatcccgtgttagagtcttttgttatattgttgggggtgttaggcctcagggacaggcctctgaccttctcctgccttcctttcactctaatgttctcccacctttctgcctttctcattgtggatcttaagaccctcccatgagacagtcccaccctatatcctgggggaaggaatgctgacatcatgaagcttccataaaaagccaagaggacaaggttgttaagcttccagatagctgaacatgtggaggttcctggagagtggtgcacccagggagggcatggaagctccgtgaccctttctccatacctcaccctaggcatctcttcatctgtctcctttgcaatattttttaattataaacccgtaaacataggtaaacatttctctgagttctgagagctgctccagcaaattaatcaaacccaaagagggggtcatgggaaccccaccttgaagctggctagtcagaagttgtggaggcccagacttacaactggtgtgtgtatgggggcagtcttgggggctgaaccttcaacctgtgggatctgactctatctctgggtagatagtgtcagaactgcattggaggacacccagctggtgtccgctgctatattctagctgattttctccctagtagtcctagtagtcttgagtgtggggagacagtgggggattgatgccccaaccacaattgtggatttcttctttcagctgtcttagtttttgcttcagatatgtgaaagtctgttgtttggttcataggtatatagagaaaactctccctagctgtgtttttcttctgctgtcacaccatgacaacatcaacacagaagcctttcttcatatcgtataagggcacaaaaaaggaatgacataaatcatgttaagtgcagtctatttttcctgagctgttatctttaagacaaaagatattcaacaaatagaattttatttttttgcggtgtggggtatccactctctggttacttaggagaaaaccagaggattatctttatggtgagggagagtgtatagaaggcaatattttttttcttttataaaggcacagggctctatctgttggtgcagtgttctgacttttgtgttttttctggttaatttaaaacattagctgcaagtttttaatacagtagtttcccatgagtcactgggcctttcttctgtgttgatgattgtggtgtgacagtaaaagaaaaacacagttagtgagcattttctctacatacctatgaaccaaacaacagactttcacatgtctgaagcaaaaactaagacagctgaaagaagaaatccacaattgtggttgaggcatcaatccctgctgtctccctgcactcaggacttctaggactactagcaagaaaatcagcaagaatatagaaaaactcaaccacaccatcaactgacaggatctaattggcattcatagcacaatctgtccaacaacagcagaatacacatttttttaaaggtcccatgagacatttaccaagatagagaatatcctagatcataaaacaaacattaaaaagttcaagagaattgaaattatacagactatgttacctggccataataaaatcaaagtagaaatcaaggcagaaagtcaataggcaaatctccaaacccttggaaactaaacaaaaaacatttaaataatccatgcatcaaagtggtaatctcaaaggaaattttaaaaagacaagaaaagaatgaacatgaaaatatgacatgttaaaatttgtaagattagctaaagcagtgctgagaataaaattgataggagtaaatgcttacattagaaaagaggaatgatctcaaattactaatctaagtttctacttcaagaaattagaaaagttgagcaaaataaactcaaaggaagcagaaaggaggaaataaaaaagagcagaaactaatgaacttgaaaactggaaaaagaaaaaatgaaacagaaagttgtctctttaaaagaattaataagattaataacttttagcaagaatggcaaatataaaaagagagaagacatgaatcaccaacatcagaaatgaaataggggacaccacaatagatgtctttagctataaaaagataatttaaaaactgtaatcaactttatgctcatatattcaacaagtttgaagaaatgggctaattcctcaaaaaccacaaagtactaaaacttagccaaggtgaaacagataatctgaatagctgtgtagatatttctaagaattggatttataataaaaatactccccaaaaagaaatctccaggtccagagggtttcatccaagaattttaccaaacattcaaataaaaattaatgccaattctatgtgtatcttccagaaaataggagagaagagaaaattaggaagttcccaattctctttatgaagccgtcattactctgatacccaaaccatctaaagaaagtatgcaaaaagaaagctacagatcaatatctctcatgaactttggatgtaaaaatcaccaatcaaatgtaattaatcaaaatccaacaatgtataaaaagactaaagcaccatgaccaagtgaaatttatgccaggtagacaaagctgattcaatatttgaaaagaaattaataaaatttatcatagcaacaggctaaagaagagaaaccatataatcatagcagttggcaacaaaaaattatttaacaaaattcaacacccattaatgatgaaaatagaaaatcctctcaaatacactaggaatagagggagacttcctcaacctcataaagaacatctattaaaaaactacatcagacattgtatttcatgataaagacagaatacattgccttatacaatccaaaacaaggcgaagatttctactttcatcagtcttattaaacacagtactagaagttctagccactgcaataaggcaggaaaagggaataaaggtcatgctcattggaaaataagaaatgaaactgtctccttttttaggcagcatgattatttaaatagaaaatcccccaaaaaatctatgaaaaataggttgtcctccttctgttggctacattgatcaggcaagtgctgctagttgttcttaggggttctgcttaagtgctgcaggagatggcagcacagaagctgaggcacagcttgggcatggtagaccagggggacacccaactccattactccctagctctatgcccctgaacaccttccttgatccagctgaactttggtcccctcatctgcaatggtgttgatgatagaacccagaggccataattcttgtgagtattaaatgagagcaagtgtgtagtaaatgtgtcattgtacttgctgcgggtactgctgctgttgctgcagttgtatgtgatactgtgctatttgttctgccactcccaggcactgccactggagcccttgttcagtgatcctatgacttgtcagctcagtcaattgctctgactcttactgctttcatttatgaaatggagacaataacccctctctcataggaagggtaagaccagaagagcctacactatggttggaataatatttgtatacagtgatcaagagaatgttctctgaaaccagactctctttaaatcttacctctatcacttattagttatatggctagctgttaaatgaggtcaaaagagtgtgttcttcataaaactatacagaagattaaattaattaaaacatgtacagtccttttaaaaaagatcaagtgaaacagcatacatgaaagtgctttcagcacgctgagaataacaatagcaatggctagagattatggagcactccccactgccagcaccaggggaactttgtacctacaactttttacttagtccacataaccatgaattcgtctcatttatgtagaccgggaaacaaaagcctagagaagtaatttgcccaaagacctagcttacaaagcaatagaatccaggtctggactctcgggatctgactgtgttctaatgcctcccagagaaagtaggctagagagggcaggaatagcttgacttagagatcacttccactggcacggtgggtacaatctgatgtgggaggctctgggtgcagcctgtgatggcagagtggaggagccaggagtcattcttggcctcattgtcactgccttcaaactaacaagttgcctgagagctaaggttccatttgataggacaccgggtgggatgtgcatcagaatatccatttccttgaaggatccaatgattaggctgaggcaaaatgttttagaccattcccaggtctaaaaataactccatcatcacctctaataaggactcagtctggagtgacatcactccttcaggtgcagaaaaggaaagcatgactgtgtgtcactgacttaaaataggagtgaggtgagaggggcagctgggctcatggacgtcaagtggacagtttctcagctggtatttcctatatttcctgttttggacagcaggttcctgcccttctaagctgggggtaggggtgagggagtgtatgttaaaaagctctgtggacttgctttttctcttctccatgtgtgttctttccatcaataatctgcgttcatctttactggctgttcatgcattatctggagatacgctagttacagaaattcaaacaggcaactcttcctctttctccctagctttacactacagatccatgaagttttcttgactgtccctgcctagggtacaacaaggaaaccactatttggataattcccctgattccatggtactgtggaagtggtgggctctccatatgtcagggtattctatgtctatgaaaaggtatctcttttgagaccaagggtggacgggatcctaagagtctaccaatttttaaaataatttagctatatttaagtcaataaattgtattcaaggctgactttgtagtgatgtattccatgaattatttcattcaaaataattttgaaaggacttctggtccagacaaaatagcatagatccatttctgtcttctctcctctcagttaaatgcaattataaagtctagaaataatgcaagaggtaaccaaaggagaactctgaaagatggaaacagaaagaggaattagttagggaccctaagactggaggaacaatagaggtaggatgtcttaccatcaccgcatccaacaagagaaggtgacctaggcctggtattacctgatcccaacttggcaccaaaagacagccaacatagactcattcctcctgcttcctggtgagcctggtattctcctccacttccactgacagacatgtagggtgactgggtggtatcaacaataggaaccacatcataacaggcagcctagtttgggaagcactcttggtctccgtaggcctgagactccttttgcccatctagaggcaccaggtggcccagcccatggaaattccctcagccccagaaaggggcaccagaaaggaccagtgggagctccagtaggctataatagtatgaaggctctgaaatgaagttgccactggacctacagcccactaaactaggctaggaccttaggtgatagcctgaaaaaaaaaaaaaaaaaaagacccagagtcttttaacataaaaaacaggatgtgcaaatacaatgaaaaaacacacattataccaaggactaggaaaactacctaaatgagaaaagacaagtgacaccaacactgagatgaatcagatagtggaactgtctgacagactttaaaacagccattataaaaatgtttcagaaagcaattacaaattctcttgaaacaaatgaaggaatagaaaaatctcagtgaggaaatagaaattgtgaaagaagaaccaagtggaaattatagaattaaaaaatataacaatagaaattttaaaaaaatcactggattctactcaatagtagaattgatatgacagaggatagaatcagtgaaattgaggaaagaacaatataaatcccccagtctgaataacagagagaaaatagactgaaaagctctaccttgaatgataactttgatcacaaactagtagtattaaccacgtggaagaggagttgctaaatcaacttaagagaacaaatagttttaggtgagtgacaaataattggaaaattaaaaagttaaatgatgtcatgtataataacatcaacatacagagaaataaatctaataaaatgtaattaaaaactataaaatcattgtgaagaggcattaaaagaatccaaaatatatattcatggaataaaagacaatatttttatagtcagttctgtccaaattgacctatagagtcagtacaattttacaacaaattttagtggaattttgtttattttatttgaggaataaagtttatattttatttggaaatttaaaggactgaaacaatcttgagcaagaacatttgttaagacttattctgaagctttagcaaataagacagtgtgagatacacacaagcatagacaaatagaccaatggaacagaaaagagagtactagaaaacagaccacgcatattcagtcagttgatttatgacaaaagcaatactgccatgcaattggaataggacagataatgtttgcataaatgttgcagggtcagttggatcttcatacttaaaaaaaatgaatcttgactctacctcacaccacacacacaaatcaatcagatagaatgtagatctaaaagtgaaaggcaaaataataaaacttctaaaagataacataagagaataatttatgaccttggagtaaaatcttttcaaatgtaatacaaaatatactaagcacaaaggaaaagactgattgatgaattggacttcattaaaactaagaacttctgcccgggtgcgatggctcacacctgtattccaagcgcttggggaggccaggaagggaagatccctacaaaatatttaaaaaattagccaggtgtggtggcatacccttgtggtcccagctactcaagaggctgaggtgcaagaattgcttgagtccaggagtttgaggctgcaatgagccctgtttgcacaactgcactccaaaaataataaaaataaaatacataaaattttaaaacctaagaacttctgtttatcaaaagacaccattaagagagtgaagaagcaagcccttgagtaagagaagatatttgcaaatcataaacccaatacagggtttgtatctagaatatttaaagaatttccatgagtcattaataacccaatagaaaacatgggcaaaagatttgaacaagcacttcacaaaagaggctttgtaattttctaataaatgctagcaaggaagtgcaaattcaagtcataaggagataacctctacagagccaccagggttgtccaaaatgacagactaataatactaagtgccagagagaatatacagcaactacagctgccatcctctggctggtgtgagtgtaaattagtataaccacattggaaaactggcaggatctactacagctgagcatttgtgtatcttatgacccagaaattctacaaaaatgttcatgactctctagttatagtaaccaaagactggaaacaatccaaatttccatcaacagtggaatggataagatgtactgagcaatgaaattaaaggacctaatgcaacagacagtaacatggatgaatgtaataaacatcatgttcagtgaaagaagccagaaaaccaagagggtaccctgatgactccatttacatgaagttcaagaacagacaaagctaatcaatggggtcaggagtcaaaggtgatagttattttgggtatgtgactggtaggggtacaagtgagacttctgtggtgttggcaatgtcctacttcttgacctagtcagtgatttctctggtttgcctcctttgtgaaaattcatcagtgtgttctggttattatttgtgtgcttttctctatgtatcttctacttcagtaaagagtttactgaaaagaacatacttgggtttgcagagttgaaaacacccgcaacatcttcattgcctcacaaagactattttacatgatgtttaaaaactttagaagctaaaatgctgttctttcattctgagctgattacagattacagattagtaagaaagtaagtgggctacttgtttaaagatggtctatgttaagtaccctgatatcttcttttgaaagagaggtcagtcttcctttcagcagagcattctgttcacctgcctgcccacctacctcatggaccttacagagcttggttaccctgactctaggcctctcagctcttgtactgatcctcccagctgctctattctgatgccatgaccctgtctggagactagagaggctaggccacattcagctcttccttgtcactgtacaactcacctggtgacttggtttttttttttttttttttttaattccatgccgatgtaccctgacatggagaactaaagacagaattatttagggatttcctctctctcattctgaaaacgtataaatagcctttgctgagttactttgttaaaataaccctgacatttttttaaatgagcaaaggggctctaacatggaaggtagatatactgaaggaaagagcccttaaagacaaagggctagtttatttcattatgagatgtccagggctttccagtcccttaattctatcaatgaaccgagtgagaggtaacaatgagctgtacattttttacaaaacctctctgcgtagtcccagtagtaggttgctgaaattatgttaaagtcaggtggggacttctagaaaacccactgtaaccctcttgtttggatgacattgaggccagggaggggaaaagaacttgcaagttgagcagtaataacacagatcccacaggacagctggcagtgaccccacaacagggatttgaaaacaaagtaaggtcttgttgtacccttggttcctcttctttacttcctactatcaaagtcaggttctagaaacttccctaggaggcggcaagaggcagtctctgcctcctcccagtagcaaattggccacaggaagtcctcatttgggatggactggaggagagaggcagctgtgtggaaagggcaaaccttgaaaacacccaagtccttgattgggcttgcagaaggatgtggcaaagagtaaagatcttgagttctggaggcacaactcataggttcgaatcttttttttttcttttttttttttaaatggagtctggctttgtcgcccaggctggagtgcagtggcacgaccttggctcactacaagctccgcctcccaggttcatgccattctcctgcctcaacctcccaagtagctgggactacagcgccactacgcccggctaattttttgtattttttagtagagacgggatttcactgtgttagccaggatggtctcaatctcctgacctcgtgatctgcccgcctcggcctcccagagtgcagggattacaggcataagccaccgcacacagcccgtaggttcaaatcttacctgcacctcttaacctctcagggcctcagtgtcctctacttgtgaagtagggataacagtcatattcacttcctggttttgctgtgcaaaatgaatagcatgtgatgctgaggcactgtaagtcgtgagggcagatgatcacccgctttaggagccattcttccaaaatcttaagtgagtgaaaaagaagcagagatagctttttgtatttgcgcatggaggcagagttcatctgttgcctgagctaacagtatactattcagcccctagtgaaactctggccccagggcaggaccaactaactaggtagggcagtgatgaaaaagggagagtcttctcagtggagtctggtctgggtagagatgtcaaaggcaaaccatcacctccttgacttgttggctctaggtgatgatgctaacctgacctggagggatagcccttctatggggtgggcaggggcagccagaggtgttctgaaaaccagagaagtctcctcactggaaaacatttattcctgggatctgtcagttgatggcagaaatgttcattgttaaagagccgtttctttggcttattaattggtcctctgttagccagtcaacaatactgtacccagcacagatatccttgagaaatgaaggagaaataaagtctttcctagataagcaaaaactgatggaatttatcatcactagactgaccctacaataaatgcttaagagagtcctacatctggaagcaaaagggctatattcaccatcatgaaaaccctaaagtataaaactcattggtaaagcagacacacaaataagaaagagaatggaaccacatgttatcattacagaaaaccaccaaactgcaaagataaacaaaggaaagaaagaaagaaagaaaggaaggaagaaaggaaggaagaaaaaggattatttaaaattatcagaaaacaattgaaatgacaggaataagacctcacctatcaataacaacttttttaaatggcttaaatttcccagttaaaagatatagactggctgaatggattttaaaagtgacctaactctatgctacctacaagaaactaatttcacctgtggagacacacatagacagaaactgaagggatgaaaaaagatattgcatgcaaaaaaaaaaaaaaaaccaaaagtgtgcaggagtagcaatacttacagcagacaaaatagattttaagtcataaaacatagagaaaaagaggtaattatataatgataaagggatcatttgagtaagaggataaaacaattataaatatacatatactcaacactggagcacccagatataaaaagaaaatataattagagctaaagagagatagatgcttatacaatcatagtttgggactttaaaactcaattttcagctttggagagatcatctagacagaaaatcaacaaggaaacattagacttatactgcactagagactaaatgaagctaatagacatttacagaacatttcatccagtagctgcagaatcacatgcttccctcttcagtacatgaaacattctctaagatagaccatatgttaggccacaaaacaagcctcaacaaatttttaataattgaaatcatatcaaatatgttctcagaccacaatcgaataaaaccagaaatcgatgacaaaaggaactttgaaaactgtacaaatccatggaaattaaacaacgtgctcctgaatggtcaatgggtgaatgaagaaattaagaaggaggtcaaaaaagttctcaaaacaagtgaaaatagagctgcaacataccaaaaccaccagcattttttttttagcaataatctatttttaaatcaggtgtgtatattttttagacataatgctattacatgcttatgggctacagtatggtataagcataacttttatagtcactaggaaaccaaaaaatttatgtgactcactttattgcaatattcactttattgcagtggtgtggaaccaaactggcaatatctcagaggtatgcctatagttaacaagaatatattgcatatgttcacaaagctggaagagaagattttgaatattctcagcatgaaaaaatgatatatctttaggtgatgtatttcctaattatcctgatttgatcattatatgcatgtactgaaatatcactctgtgcaccataaatatgcgcaattattttgtgtcaactaaaaataaaaggaaaaataaaaggcagagccctctgggaggagaagactaattaggcttagtgattgctaattctgggagctgcatgcaagcaggttttaaagaaggcagaaaacttaaggatgtggatgtaaaaggaagttacaatgacaacacaatttacagaaatcacttagtcacctggaggactccaatttcaaatgtgccatgcttggatatttgcttacattttgcacaatgacttttctgccatctcctgtgaacctctgagcaatcctgtaaagcagggatcatgcccattttccagatgaggaaacagagtgcccatgccctgcccatggttccagaatgcagaacagtcatccttgggagatgggggtgtctggtccgagtacctccagtctcacctctgctttgtgtcgcaggtggggaggggtcactgaagacaaaggctccttgtggctataggaagggtctgcccaccaggagaggtgggaggggaggagtcttattcaggctgccaaggttaagcctggttaaccacttagacccagagttaactagcaaggggcacaggtacctgcctcagagcatttgtctctgcctggagtgtttgactagaggtcctgagagcctggaccctccgacgctcaggtctcagctgccacattcccaaaggtcatgatcatcctagaccactcaggtgctctttgttcttcaccctgcttaatttttgttaggagtgcttctgatggcttctggtccatagcctgcctctgtctctgccctgccaactccgtgctctgtctcaacgttgcacctgaaactgtgcctgccatggggtgggtattcagtagccaactgatgaatgaatcaatgaataaatgagcagataaatgaatgggcaggaaagctcctcctgtcactctctacactaacatgtaggaagtgttggagggacacacgttagtggatgtcggtcacttagtcctgataaaacagagtagatggttttcttagtaggagatcttgagggctcttctgtgaagcctcttgtggaaccagtgaagtacctgaaaggcaaggattgggcaaatcaattccttctggttgtggaggagaagcccttctagggttgatgttaatgctgcattttaatgaaagtgacttttcaggcttataattggatgacatcagctctatttctgcttttgcttctagaatttagtgtgattctattttaagagactaagaagaaaaagcaatttttagactctcataagaatactagcaacaatggcaatagctaatgtctctgcagcacttagaaaagactgtgccccctgccaagagcttgacctgggctatctcgttgaatccttgcaacacacagccccttgtatagatgagaaaactaaggcctgagccagctggccactcatccgtcacagcctcctttcctttccagtgttggggacagctcacagtgggctgtaggatgccactgggcatcagcctggcaaggtagcaggtcatctcatttttcttttttctggagggtgaggttatcctgcaaaatggaggtcatggggcctcctgccctggaatttctgcctcatccctgacatcttggatgttatcccaggctgctctggtccagttctggcttcattttctcaacatatcagatgcaagagaggcctggcctgctagctcctgtctccctgctctgctgcattccctccccacgcggtgcaggtactgactcgttctcaaaactgtcagatgggctgccacctacctgggagtttcatgacatgtcctgggatcctactacgccagaggctcaatgcctggcagagtgaacacttagtaagctgcagttgccctgaaatattttcctgttgctgattcatttcctcatctgtggataccatattccaaacttgctgtgccaccctctgaaggggcaagttctttcctaggagtagataccaagagagaggaagcccatgtcatggggacaaccacacaggccaaacacaggtgtcactgcctgcagggacagcctgcaggcatcaggcctcccaggagatagcaggcaggacaggaccatttcagactcatttcagcagtgtgtggacagaaccccactgagaaatgcaagcatgagacctggagtctattcctgtcttgtcctggggttccttccactggatgctcatcaggggaaatcctccctctggatgctgatgtggggaaaatggccaactagttttaaccttaaactcatccaaaacttattttctctccacttgagatagttgtcaggagatctgagttctcaccttccttctgctcttcccttgtatgtgaccttaggcaagttgcttaatccctctgagactcagtttcctctcttgtagctgcaggatgatggctgggctctattctagatcagtgagactcaaacctgccctgtggcatcagtcaggaacagttttgccgagtaggctccagtccagaccaatacatcacgatctgtgggagtgaggcccaggcgattcccaagcactggaagggttggaaattcaggcatatggtttctgccttaaattccatctatgaaagccgaagcgctctctttaccaccaccacctctccttcccacccttgtcttgtttgctgctgatttctcgcctgactcaagaacaaatgtgtttaagccccaagcccctaaaaatgggaagctgtctatttcccttctgtaccagctcccacatgtgtctggacacagactctgccagggaagtcccctcccatagggaccgtgtgcctccagagttgtgtggacaggacttgaagacatccaaagcccccacaagagatgatgacaacaaaactctgtgttaaagagtttccaagatggagaactcctgcctgtcaattatccttctcagacactgattttgtttgtttgttttctggctagagacgattattccacacaggaatgacagacagtccctctgttctttgtctgctggtcctgggggcctcttgcgtcagtgggaatggaaagtatcaactttcttatttctccatgttccctcttgccttgcatctttcttcctgctttcatttctaatttcttgggccctttgactttctcttcatctccctcttcattcttcacacaataatgtttatttaattttggatgttctcttctggccaaaagttgacttggtccagaccaaatggaaatatatgtgattaaatctgttctctgcggagagggactaaaacaaagatcaatgccagatattgtcgtgatgatgaaatgtcagggcagagggcaccaggaaggacagaccaggctcacagaagcgtgccattctttcacagcacatgcagcacacaatatgcagaggcatgacattccaaccttctccaacccaccgtttatcagtgtgtcccctggactggtagtatcagcatcacctgagacttattagaaacacaaattctcaggctccatcccagaccaactgaatcagaaacactgggggtggggtccagaaatctgttttcacaagccccagaagactctgatgcatgtggaagtttgagcaccactgcttctagtgcgtagacgttttgcttgctatcattgaaaactcgcttgacctctttggagaggggcatggcggcccccagatatctgaggaaggctgagcaggaggataaggtgagctgaggaaaagggagggagcaatggggtattcacggcaggggagcctgagatggtcccttaaggatttgcattggttaatgggcagactggtgcaaaagaggctgaattgaataattaggaaactgggagaattcaattcaaagaagaattcttgttcgcaaggtcaatttttatactatttaagtaaaataactctggtaggttctatagcaaatgctaagtaaagtaaccgctggtttctaaattattacgataatctgagaaaattatttctttgaaaaaattatagaactttcaaatatgcaaaaaactctagagagtaatataacaaatgcacttaatagggacaacctttaacattcagcagagaacattttactctattggcttcagatcttgttttgactgcagcttgattcccacagtcctctctcatccccacccatcgtgggtcctcagcctcatctcaccaccctgagttgggtatagaatttcctgtccaggtgtttagaattctatacatttatctaaaagcaatatagggtatcgtgtgttgggttttatatgctgatgtaaaaggagttgttctgcaatttgctttcttctctccatgttattgagctctatcctgttgctacctgtggacgtaactcgttctcattgctgggtggtatctatcttatggtccctttctcatcatcatgagcatttaagtgaagatcgtcttcaggatttccatgtgctcatgtgggagagtaagtcctgaaagtggaacatcacctgtaaatatattaaagacagggttttccaatttaactgggaaagtctccagactcagctggagctacattatctgtttctctaagaaagaacttttctgtccataaactcattgtattagtccattcttgcaccgctataaagaaatacctgagactgggtcatttacaaagaaaagaggtttacttggctcacggttctgcaggctgtacagcgagcgtagtggattctgcttctggggaggcctcagaaagcttccaatcatggcagaaagcaagggggaacaggtgtcttacatagcaggagcaggagcaagagagagtgagaggggagatgcttcacacttttaaagaccagatcttgagagaactcagtaccacgataacaacaccaagagggtagtgctaaactattcatgagaaatccacccccatgatccaaccacctcccaccaggccccacctccaacactagggactacggtttgacaagagatttggtggggacgcaaatccaaaccctatcactcatttttttctcccttcaatcattcaaccaacaattgctgagcaactcctgtaggtcaggcactgtgctgggggctgggaaccagtgggaataaatcctatgggtctctgcccttgtggagattccagagtagggctgcccggatgttcttgcattgtgcacagtgcagagacaggaggctcccggatattctggcctaggcaactctaaccctgaaaaatgaacaagcccatcacattctattcatgtggttatagtttacctgaaacctcaactgctccacagaatcagatctctccgcagctcccaaaagtgtcccaagggttagcactgaccagcttgctgggtttgaaggaaccacaatgcatcgggtgtggctctcttcctgctagctgctccgaagtgagctcctactgattctattcagttggacgctcacattcagcgagtccagggggtttttcatgctttgagcatttttaagagtctgctatttgcccagttcagtgaggggcactcaggatgtatcagtggttcaggctgacttggttcctgcctaggggaagacccacaagaccagtacccaatgcagggatggcatggatggtaggggaggcttggaggccctaacccactcttgaagggatgacagaagcctcccaggctgggattggaaggatgaaaggagcagacaggccagggtagagggcattgagtcccagtttgagcgaagggctggagcaagagagagcctggtctctgcaaagatctgaaagaacctcagagcaggggccaaagggtaagggtgtcagggcagaggctgtgccaaaagaggtgagcctcatcctaaactctgttcttgatttggggtggaagtgtccctggaaaggcagatcaacaaaggaaggagcatgagccaattctcaccacacctcttgtgcttcaagtcctctcttgggttgggtgatgtcatacagggacccacacttgattggactgccctccccaccttttaaacctctcctgtcactgagggggtacaccactggagcctggcaaaggtagccagtactcagggggtgtgcacaaacctcacacccatgtttataaggccattacaaatgctggcccagttggtgaccagacaccaatccttgtccttccacgtagccaacagtgggctagttggcaggtgcatggcaggcgctcagggctatagacaatgcaggctttaatcccatgagtggagtcggtgccaagtctagaattcaaggatgactcttcacccaactgaccctcttacccaacaaaccaatgagaacagcttgaggtctggaggacccgtgcttgatatctgtccactcttgtatttgagtaaggtagtggaggtcacaggctcacatcataaactttgtactttatttgaaacacttttctggctctgttagtggctccaacaccatacttaagcttacttcaaaatgacttatacatctctattttccttaaagtatgcgcacagataagaaaagatggggtgaattttttttttttttgagaaggggtcttgctctgtcacccaggctagagtgcagtggtgcgatctcagttcactgcaacttccgcctcccgggttcaagcaattctcccacctcagcctccgaagtagccaggattacaggggcgtgccaccacacctggctattttttgcatttttagtagagatggggtttcactgtgttggccaggctggtcctgaactcctgacctcaggtgatccacctgcctcagcctcccaaagtgctgggattacaggcgtgagccacggcgcccggccaagatggggtaattttgatgtccagacacaagttgtcatttaagatgaagcttcgattgtaactctatgaagccctgctgaatattaaaagcttatagaaagcagcttttctcccccaggcaaaaagagcccttcgatctgtggtgggactttgcaaaaagctgagctgccactcaaagaaataattccccgctaactgcaagtttctgtcttgtttatggagggcctgttgagaaggccctccaaacctttggttccagggtctggcaaggggaatctgtcatcattcattgcaaactacacctccacccactgggctgaagacctgtgcaaggatagaccaagaacttcctctggggtggctgtgctcatggatgctgatttgacaatttccaacctccctcattaccaagatccccttccttcacctgtgaaaccaaaattccatcttcttctcttccctcctttgtgacagagtggggaaagatggggactgagggaaaggagagtagaaactcagtcccttgagagatgggagctgatgggaaggaggtagaaacttggtcctttagccaggaggctctgcaggcattcaggcctgatctaccatgtaaggtgatttctttctttttggaaagctcccatttcatggggtggacaggtccaaggactgctctggaccacttggtgatcacatgggccgaagtaggggtagaggaccccaaattgaatgtgtggaggggactctgaagcaggtgtgaatgccaggagaggtgggaggaaggacaagggtggtgcatcaagaccacagaagccggcccggccagccttcccacaaagttacttgaactgagctctccataagtacacatgcgcacacacccaagaataaactggacaaatggcagcagaaagagaaagaacagaaaagagagctgatgaatacatccataatcagcactaacacagccctggaaagaaaagcaaaaagaaaaggcaagcgctgtggtgtgcagctcttattgtctaataaaagaaaatataccaattctttggggaatttaattttttctggaaataaattcttggaagaatttatgtgacagaacaccccaggggaacatccttgcgttgggaaggaggccacctcgtctggcggcctcgggcattccagtgatgcaggggaggggcccaggcagctgtgctggtccaaggggctccaggtagaatgagctgtatccttggccagaggatgttgcgcatcctctggggggatatgacgggagaatgatggggggagttggggagatgtccccaggtattacaagtggaggctggggactaccactgtcagttcattgtcaactatgtccgcctcatagacagggcacaagcctatccttagggacacacgtgaagaggggaggcaggaagattcaggcgcgctctccggcctagactggctgaaggagggagattttaatgcttggcataggtggtgaggggtccaccaaaggtaggaacacatccctggggctctgggaggaagaagcgtcaggactgcagctccagcctcttcaggcccagggtcctagggcggaacaaggctggaaaactggtgcatggaggaaagaaaaaaaatgggaagggagaatggacaggtaggaaggaaggaaaggaggaaagggaaacggaggaagaaagacatggaaagctgggaggacagagggcaaggcagaaggtaaaggaggcaaggccaaggctgtgaggaggaattccgcttttattctgctgtctggcttcatgccattgcatggggccctgtaaaataaaaaatgatacctcccagggctattggtttttatcttagaggactctgtggggagatgtggaaagctgttcaagtggcaagccttgggagctgagtttcatgacgatggccgtctagggctgttcaaagttaagatgacagattggcagagtgcagggaggtgagagagtattggggaagttttccatacaggggaccatgtagtgttttgctgggaagatagacctgggtggaggtgagactggtgggtgccacagatgattctaactcctgctccttctcttgtccttccaacaaaccaaccacacatgtaacatagtcataagagcttgcagggaggagaaaagagagatatcaacagaccaagggagacagagggtggagggccatgctgtggacagtgaggggaggaggtccttcctctccgccactgccctcaaggctgcttgaggctcccacgctgaggtgtccacctggctgagaggctgctgcttatctgttccccaacttctccacctgctggtgcagctctcccttgctgtgctaggagagaacccactgggagggtcttggcatctccaagtggggccctcctgctgagacactgggtggctgtggagggagctcagccctcattcctccccgagctcatatctacagagcagcaagtctccccactccaccagaggagagcacaggagagctaggcagctgcctccaccaagacttcacccaaccacggtccttcactcccaccaggacaggacaacccagcctcccgggtcccaggaggacttggcatggctgaggacacccaagaggaaccaccagcctatccctgaaaaagcaaagacactttggggaacagaagaacgtcttaaaagatatcaactttgactcagagatttcaagaagacgctctatccgaaaaccaaagaagaagtgtcaaagctgttgtaaatgtttaaaagaatagccaccttgattgcattttgagtgaattgtgaattccctctccctgggtcttcctcattcttctacatcctccccatttctgtactgaatttatagcagactgaatttggaagttgatttgaatgtttaaatatatgagacactctttgttactttggaatgagtaaggcattaattcttttacgttttgatttttaaaggttttatagaaaattgcatgtttcatcaggaaaaaagttatctagttctactcaaaataacatcttatggaaactttcagagtttcaccagacaaaatgccccaggctttggctttgcagctggtgtctacagctgagcctagtccttgaagtaatcatgactcagcttattcaaaataaactcttcaagaattgcaaactctcctctcagcgcatgccctgtgacctccatgtccctccattacatctcctcagagtaaggcccaatgccactgactcatgggggaaccacaggcagcaaatggccagagctcacacagagggatgagtgcacttcacctgcagtgtgactcagcaggccaacagatgctatcagggaagagcactaaaaaccaaagggtggctggctgcgtctcagcatctgtccgcgagaaacacgatgccatggttattttgtgattttggtggtaggctgctggtcaggtgtctccaagcaagttggtcaaaatgggaacagttgtttctctgggcgggcaggggtcaaggctggtctggaaaaggccgaggcagctgcaccctcttgagccactggccagcacctgtgccctgtctggggctttcctctgcccacaggagacccttctccatgcaggtgctgcgtggcaccaggcatgagtctgaagttccttctgccacaagcaccctcgttatttgtgattgtgcaaaaaaggaagtctctgccaagaaactaactgaatgttagtgcctgttctcaggactttccataaccctgctctactaggattcctttcaccctctttgaaagcagccaaagggttaagtcatcccaggtgcatctcaaagcagggctgcgagcagcaggagtttgagctttgttgcaattagaagttgagtgtgagaaaggacattcaggcacagcttatctttgaatacacatgcaggagtatcaggagcagttagagataaacagctggctaataaacacatgaaaagatgctcagcatcattggtcattagggacaggcaaatcaaaaccacaatgagactctacttgactcccattaggatggcgacaacacaaacaaacaaacaaaaaagaaggtaatcagtgtggatgaggatgtggaaaagttggaaacttcagacattgccgttgagaatggaaaatgatacagctgttttggaaaacagtttaatgtttccttaaaaagttgaatagagaattagcatatgacccagcaattccatttttatgtttgtaccccaaagaattgaaagcaaggactccaatagagactagtataccaatatttattgcagcattattcacaatagcttaaaaaaagtgtaaacaacccaagtttctgttggcagataaacaaaatgtggtatgtacacacaatggaatactattcagccataaaaaggaatcaagttcttatatatgctacaacgtggatgaaccttgaaaacatgctaagtgaaataagccaggtacaaaaggacgaatattgtataaaaacacgtatataaggtacctagattagtcaaactgattgagacagaaactagaatcgaggttgccaggggctggggagaggggagaatggggagttattggttaacaggtacggagtttcagtttgaggtgatgaaaaatgttttggaaacagtggtgctggttgtacaacattgtgaatgtacttaatgccactgcattgtatacttaaaataactgggttaggggcatttatggattttcctctcattgtaggtcactaagaacatggtgggaggaggagccactgcctttataggccccgactgccccagagcttcattcctcaccaggatgaatgacaggattctggactagagggctcttgcctgagccaccagggcatccgggggatccctgtgagcagggtgagggtgagcacccaggttccacagggctctgtcctgggcaggccagcagatgcagtgattgcaaatcctccttgtacaaatggaacaggcacgtgcatttgtggcacactcagagctgctggccactagtgtgctttggagaatcagttgtctcccaggcagggaaggtccctcagacataaaatactcacccatttagaggaatgacaacagcaaacgaaactatattctgctaatttactggtaagagaggaaaaactctgtcatgcatacacagacagaggctctgccaaaagagagaggcagcagatacagatattagcaaatgactcctctccagaagaaacacaccagccaggaacggcactcacacctgtaatcccagcactttcggaggccaggcggtaggatggcttcagaccaggagtttgagactagcctgggcaacatggcagactccgtctctacaaaaaatgaaaaaaacaaacaaacaaacaaaagatcagtgtggtgacacacacctgtagtcccagatattccagaggctaggcaggaggatctcttgagcccaggagatggaggctgcagtgagctatgatcctaccactacactccagccggggcaacaaagcaagaccccatctcttttttaaaaaaagaaagagaaaacgaaaagaaaaaaaacacacacgatttcacctgcttgaaggcctgtgcttctctttgttgtccccatgacactatacccaggccactgtcagggaccctggggggcttacagtggcttactgaaggctagacagtatccccttgcagtatcagttaggattctatcatcatgagaaagaggctccagctcgctcaacggagcaaactggaaggtaatgaggggctcagggaatttgtcctgggaaggcaggaagcacaaccctgtcttatggcagaggccatcagtccagggtcccagctggacctgctgatcctctgtccctgtctcactcattgcagatgccacctcttcggtgagggcctgtgagctagggttaggtcacctaccctaccctgtgtgaccacaggcagggagagacaggatttcacttcctagacttccacggtggaggccaggcacctaagattattctcccacccacaccaaacacagtgggggaaaactcatccccaaaaggaaactggggccaataggcaggggtggatgtggggcagcccaaaaaccaacacacagccaccgaccccatcagccatgatttatatccatgcctttcctggacaaaaaaccaaatcccactgccctgggcatcagcgggcagggcccacacaggcttcatagatgtctcctctccgggaagtggagggtgtgtttgtgcattcggagtagctggtgcctggtagaaaatcagtgcggttttggctttggcagagcagcccaggctccctttgcattcccacaaatcgaggcagctctgctgtgctactatcacagttttggcggctttgaccgcaggtcctcctgaggccgggagactgctggggcgtggtatatcagttgttgggggccgtgcttccccagggcagatgcatgcaggggctctggggcagagtgaccgtggaagttcgatgatgtcaccccttctcatgcagctgatcgttgggtcaggaaacgactctcctggcatgaacctgttcctggtctcagcaacccgcacattgtgctggtgccaggtcaaaggcagggcaggaagccaagggatggggcaggcccagggggcagagaagggcaggtgggtgggatgtcgggggcaggtgagggtagagcatgtgtatttacccaggcaagggtccggccaggctcgcaatcagaagagagagagaagaccctgactccaagccaaacccttcaccgagggaaatgcaccaacactcagagggttcttgtttagtaggtgagcaagcagccaagcattggccttccccagggcaggggcataaggccggtgagcagctgagccaggatttgaacagcagtcacccttggtgaggcagaagcagatgaggatatgaatggggatggctaaggaaaggtgggcttgcttgcactggggagaggccttactggggattcagaattgagggctggggtttgcttccccggagggtaatggtttcagctgcctgagtttttatctcaccccttcttacctcctcctgcaatgactgaccaacttccacttcaaagagatctttgattatgactccatgacatcagtaagctttcaagtcagtgaatttaccttctaatggtgattggaactcaaagccagttcacagcttgacctgcatacatcaagcagctgggtgactgtcagatgtgtcatctcatgtgggaggagaatttgttaaagtagggagagaggacctcaggaagaggcctcttgaaagtctgtgggtgcctgaggctggaggccacacctggcctctggccttcaggacaatcctcaaaaagggattaggattagcccacctggttctcagttggctgattggttaaaaacgtgaacaccaaatattaatttgcttttgtttttatcaagcgattctatttggggtgggatgggggagaacgagaaacattttaaaagttagagtaaaaacccagcgctacattgccaatttcaagatgaagtaataaagaactacctgggagggagaatcatttctaatgaagttaactttgcaaactgagcattatgcatttttcactcttggtggttaatattgggaaagtgtctggtggtccttggggtttagggtgctgtctaaaacctagagctgcctggttgtggccagtttttgtttttaaccacgaattaagcttggatcattcagaacagactgacttactcatcagggatgcaaactccacacgcccaaagcagtctcgagtcttcagtcctgggtctcggcttctttctgtgtttcgcaggcactcacacccccgtgggcttggttctccaaacaagcccttatggaaaccaggccagatgtagggattaaagttcccgaatttcagcaaagttaaataataatagtagacacaaaacaaccaaccaacaccaaaagacataggtgcaaactatgctaatcccagcagtggagaggaacaggcctttgatgatgatggccctgatggatggaggacgatggaatgctctaaacacgaggcctcaggggacagccccggtcctccttgtcagagcctgctctagtttgggatccagcaggaacctcaggagcctccttcactttggtggagaggactgagactcagagcccccaagcgcaccttgggacggtccccacgcttccctagggtgggtctggggcaggcctggggcatttctatactgctgtttgggagagcgccccagacctagtgtcctggctggggcagatgaagccagggcgctctggctggtagaggcaggaggggaggccagccaggccccgcttgaccccgcattgacaggaaggagaacggacactttctttcaaggtgctcaaatgtcccacatcacttctgtgaaaacccaaacacagaagccacccctctcagctgctacaggccagaaatgaaaattactgcaatccccaggagcctgggaagacctctgctgacattccctatgaccactgtgacggtgcccccttcggctgcctcccccctccgtatggagagcgttccagccccaggctcccagcgcctgctcccagtgcctgctccccggcctccatcactccacgccccagggacctaaagtagaaagcttagttttctccttgtttgagtgcagttgggataatttttaatacattcctttttgctcttcatcaacttcaaatgtctcaagatgtcctgagggcaaaagagctgatttagctctcagattaaaagagagtggcctaacgcctcactcattttgaaatactgacattaacggggaaaattactcaagctctcctgttacttcctgtgcttaattaagtggctctgcaggtgactcactcccttatttttcagaatgacatcagacttattttccattttaatagcctggttacttcattgattttttaaaaaatccaatttcactttctagtgcaatttctttatctgattttttttctccacactaggaaatgctaactctcgtagtggtaaaacttcgacttacgaatgcctcaatttttttttgagtctagggccccaaatcagaatttaaagaagaaattagaggtgtaatctttatttgctaattacctaaataatttcacgaagtgttggagttgttaatattattaactattcctgagaaggggcccccggggccaccaaatgaatactttgtcttggaggcaggtctgtgtccctgcaagaagccacatctggctctcggcaccctccacacccacagaaatgcctccacttttgtcactttctccatcaatttgagaaggatgattccaaattcagaagcttgttttgagctcattcaatatgcatcaggtggcggtaacatctggaggtcagtttttcttgcagtttggtaaattctgttgtctaaagagagatgtgagaattgctcatcttcatataccacacttggcactcgtaggtttgtgaagcagcagatgcaaatgtttcacgtggtgcttggcatttatttattgtttatttgtttatattttgtttttggtttgtttgttgggtgtctgggctggccaggtgaacttcattttctgccctcactgagaggttttcctccattcagctctgactctgtttccccataggagccacaccggtgagggcagggagagggtgctggttctgagccaactttgcatggaaggcccagcagaccacgctcattacttacagccagcatcatcggggaactccggcacagacctgtagtcagtgccccacagcgccccagccttctctcccgacaggagtggccaggacagggagcagaaggtgactgctgtgctgcctggagctcttctgtccggaggcttagtgaaactagagaaactcagtggacacactacaagacttcagagatactttttgtaaacccaggaagaatcaaagatatgaaacatgcagtaggcactcactaaatgttaattttcttcctttttaaatatatgcattatgatagttaaattaatgactgcacgactggaagaatacacactctaatgattcttttccctaaaataaatgtgtccactatttgctgtcta

SEQ ID NO: 18 - DNA, 130689 bp, Mus musculus
gagtcagcacgagtcatctggttccagtgacaatgaagactgaggtgtctgctttgcagtttttttttttcttttcttgtctttttttttttttttcctaatcatgtggacatctctgagaatgaggggactgggtgactttgcagtgtctgctttctaagtttcaaagtgactttccaggcaagctgcgcatatcttgggatcttcacagcacagtggctgggaaggcaggcggacccgtctatcagcttctccctggtgagtactctcagtcaaagatgttttccgtgcacctctgagctgtgacagctgctgtgttctggggtagacactgcttctcccagactttgaaggttttgtgaggtcagaaaagtggctccctctgcctccagcccacctgttgtgtctgttgcgggactcttggaggaagtttctgagctgtgccttgtggatggtggctgtgtgttatgctgtctcagaggagagcgtgaggcttgcctgggaaggaagccaccacggattcctagctagaagctaaagtgaaggtcagagacggaggtgggtgagtttgtgttaactgggcactgaggttgaactagtttccgctcctaagaagcagaaggaagagccaaccccgggggcagcttctggtctctgactcaggcagccaggcctgagctgtccagcttcagggcaagaagtatggcagcgaggcagaattttgtcttttctctgaacacgctacatcccgtgcttccctttaacgctccaggtggaaaatgtgttcaaaagcagaaagaaaagccacaggctagggaccaggaagggcatggtggaagatgggggaagggagtgggctgagttactgctattcttacaaacatctttactgtcaaataaacagttacagtaactgctgtgccacttttaaagcaaatctaaaaagcggtcatttgcttaaaaagctgcatagcaggctgcagggaagacaggagcctgttctgagcaactcactggggcgtgtggggcttcccgggttaagaatgagtcagcaacctaactgaatgagccctgagagcagctccattcactctgagcgtaacaggagtttgccggctcgggtctttgcatgatatcagcattgcctggccctctgtgaagaggatagtcacacacgttcagctttctcctggaatgtacctgagaggtctcttggctgtctccttgtcaggaatactgtgttcggcttcttcagcatgcctgggctgatgacaatcattttgggtcctgcccctgaccgagcacagagtttgttaaacgaactctggggtgcaggaaggaccagggtagtctagagccgcagtcgcaccccaccctttgaaatagttcacacccttatgattgggagaatcgggtgagacatgaattttgaagctggcttccacaagaggcaggcactaacttggcttaaataaatcagagtgcaagcttcagagaaagaaagcctccaaatacctttgagaagaattcctatcctagagcagttctatacacggaacccaaggagtcgccaaaggcttcacaggtcaacacagggtttgaatcttttcctggctagttctgtggctctgcctgaagattgtttatctgtgtttagataactgtgggtgggtcccagctctctggggccacaccctgaagccacaaaacttggatagcaagattaagattggattagaagggaggccagtgggccccaggtcctgctgacccacttctggagaccttggacttctagatcattgttcatctacccccgcgcaaggggcccaaggagttagcacctgccaggaattcaggaaagggcctggatggaggcaggactccagtatcttacctctccctggtccacttagtttccagtcctctgaaggcacatagtttgcatgtttgtagttggccacaggacttttacagaaagtgattgacaagccagaggtagccaatagagagagcccatcattcctagttggtttggtgctcttggtaagtaagctgtccaagtaaccagagaaatgccacgtcatgggatcaagaattgtggcacagtatgtctgtgggctgagcacacttacatgggttcccatgtcgtcacatatatgcaggtcacagcagtgagcctatcgctgggttttgtgtcttcaaacctcatgtgaggattgctggattatggcttggtggtgttgtgttttgttttaggcattgattttgatccgtcatatagaggtcaggcagtcatgtggattctgacagccaatggcctcttaccataagaaatagcagggatggactgacgggtctcttaagtaattagaagagagttattgaacaaggcaggaaaaagactaaggacaagtgtgaaaacgggtgcccgaaaccacagtttgtgcattgagggggtggctccatggtaagtaaagagcgtgacgtgcaagcagcaggacctgagttcagactaccaggacccagggaaagatgtacacggttacctttgtaacctagcactgtgacaaacagaaagtgcttcagacttgatgacagtggaagttgcccagaatcctgctgtcatggtaggctcaacctgggactaacctgggacttgtggccctgtctcctcttgtcttcatcatcatgggatatctgccctgagacattttgtgcagaggtctccacagcacaaactctgtctgcttctggtggaagtgctgtgagagcttgaaggtcctgcctggtgtcctgccttcctcactgtggaggaagagtgagactcttatgactgtgaaccttgggaagaccttggggtatataccagttgccaggagatactgtcaccaggacaggtatgtcctcagagatgtcaccagcctcttgcatctgttctgggctccctagccctgtggtatttcatcaagaatggatactgtccttgaaacaaggtctctttgaggtctcaatctatagcaggctctgcactcaccagggtcatgcttattaggcaaatggagactgcttcttggtcctctcaggaaactgggttttagctgtcattatcactctaaccttcctcatcctccccatctccctccccatccccctcctccccttcctcctcctcctcctcctcctcattattatcaacattattgttatcaccataaccttcctcttcctctccatcttcctccccaccccctcctccccatcttcctcatcatcatcattattatcaacatcattgttatcactataaccttcctcgtcctcctccccttcctcctcctcattgttattatcaacaacattacaaaagtacagttcccattttattcagcccaaccacacttcatgggcccttcatttaactccacaacagccctcaggaccaaaggaagggggcagttacttgccttactcagtgtctcagtgaaggtgccagagagacactacccatccattcagcacaggaaaatgagcaggagcaggcagccaatagggcttcctgtgtaatacgcagggccatctgggccaaaggtcaggaaacccaggcccctgagacatgggcctgctgaaggtggcacaacttgatttggtgctgttgttttccagctgaatccagtgacaattgtcccttaactcatttagattcttgctacttgaaagtgattgtgaatggaagacacatcatactgaaaacattaaataagcccccagagacccaaatgaagcagtgtggcatttccttaccaactccaaagtctcaaaagccagccacattctcgtgcccaccctcgggggccagaaggagctagggtcattttggtctttgagctgtcagtcctgtgtgcagtgtttaagctccaggagctgagactggcctggctgtgttagagcattgtggatgtaatgtgtgtgtcttagttagggttttactgctgtgagcagacaccatgaccaatgcaagtcttataaaggacaacatttaattggggctggcttacaggttcagggtttcagtccattatcatcaaggcaggaacatggcagcatccaggcaggcatggtgcaggaggagctgagagttctataacttcaactgaagactgctagcaaaatactggctttcaggcagctaggatgagggtcttaaagcccacacccacagtgacacacctactccaacaaggccacacctactccaacagagccacacactctcatagtgccacttcctgggtcaagcatatacaaaccatcacaatgtggttggcacagtcgtgggtccccaaagctactctaatagcaggaacctgagggcccttctctgggtcaagggcagggatcctcacaggttctggctggatcctggttctcaaagaagagacagcaagtttgaaggaaactggttcacaggaaggagaggggagccagtgatcagctggtctcataggattctttctgatgaaaagctggttgtcctttgtatagcttgagaagtgagagaggcagtatctctaatctagcttgggttcccagcttatcttttgctttctaggttgagtacatgcaaatggggacttctgggacaggaggggcagggtgttactctgccctgggaaaatgcataatgttaaaggtagagaacttttgttaatggtggcagaagacatatattcccattgcactagtaatttacagtgtatgagggctgcacagactcctggcaattcagctggacataaagcaacatttattaaatatcagtggctcccaaaggagccaagctcacttgctctcaaacggctaacgggttctgttctcacagttgtactgttcttgggcaggaagtgattcgtcctgggagagccaacaaggcaggcggctcttccactgctcggttccgtcatccgtagcactggtgtcccttctccaacttgtcttatagtttcaggaaggctgctgaagctctgggaatcatcattgcattgacaggaggaagtggggaggggaaaaagttaatcttatgggtgtcagcatcctttaaggtttccctaaaatcctcagcaaacatgctcgactgaattttactgtcactgtctacaaatgcataggtgaaagaagatggggggggggtgagactccccaaaacagggctcacaaaaagaggacaagggctcctgtcgcattcatatcatatggctctctctggccccagaggtgatggggacccacctatttcaggtcctctggggttaatcaggtaatttcaaataaatagagcccctggccttagggccatacctcttttgatgctctaagaaaagtcacctttgctgggcatggtggtgcacatctttaatcccagcactcgggaggcagaggcaggtggatttctgagttcaaggccagcctgggctacaaaatgagttccaggacagccagggctacacagagaaaccctgtcttgaaaaaaaaaaaagaaagaaagaaagaaagaaaagtcacctttgtttccatgctgggcaccagcctggcctctgaaaccagcttcttggctgccatctgtgaccaggtgccctgtcctgacttgggaacaagcttcaggagggaaggctccctggtgtgtcttcctggaggaaggaagcccagcttggaggagtctgagctgctgttccaaagttgcatggaggtcaagtcactcagggaggatgcttcccgtctcccaggctcctggggcacctacactacgcaaccatctcgcattcctcagtcaccaaatgagaagggcctcacctacgctttgcagactgtcagtggggaggaggttccttccttctgtcctctgcatcctcctcatctgatgctgtgggatgatgacagatagactctgtcacacgcagtgttttgtgagtctgagactggatgtacaaggagcccagaacagaaccaggcaccaagcacctccctcatgaacagagcaaggcttcactgtgaagtttaggttgacctcaaactcatgatcctcctgcctcctcctcaggtgctgggagtaaaggcaggggccaccatacagctccttcattaggtaaacaagtgctcaatagctatacagataaaacgatctgctcttcatatattctgcccaaaaagcttcctgctgctttctgtgagaccactgtccaggttctacaaagtggatcctagacacagaggagagaatcgtttgcccctgtgcccattcacagtacagagaagctatgacatgaatgcaaatagcttgagcatttttaaaatcgtgtatagggtgcagtgcctgtggtggccagcagagggcgtcagatttcccccgagctggagttagaggtgtgttatgagttgtccagcgagagtactgagaaccaaaccccaggcttctgctagagcagtatttacccttaaccactgagccatccatctccacagccccacatgactgttgataagtctcctgccttacatccttcctcttcttcctgtgctgtcaacaacagcttctttgttgttagggacaacaacgtttcctgtaaaggctgtttcccaggctcctttgcagtcagaaagatgaagactagtagtgggcttgccagggatgctggaaagctctttaaaggactctgacatctctgatccttgactttgctgctctggactcccaagtgttccaggtactttggcttaaactttcagatcttcctcccttctctctttctgtcataatacagaggagatgtctagagctctagcagccttcttgaccttaaaaaaaaaagtatgtttgtcttcgtacaatgatgtacttcattcacactggattcatgattatgcccattgaaatatattattcatgttttctctttaatgaaaatatttggagtggaccctgccatgggctccaagcacggtaccctctaagtcttctggaatcatagcatcatccttggaaacactttgccttggggaaggaaatccaaggagcatatgatctgtggagatcagcagcatacatagcagcggccacagcaggccatgagtatataactcgcttctgccttagcaaacaggtttgaccgttagcttctgtggatgagcctcaatgcagaccctcatgttatccttggactttcagagtagacttgtccattcatgtgcatttctgagtgtgtgtgcgtgtgcgtgcgtgtgtgtgtgtgtgtgtgtgtgtgtgtctgaagacaaacttggatgtcaattcttaggtggtgtttgcttacttttcttcccccctcctcctcctcctcctcctcctcttcttgttcttcttcctccccgtcttcctcctcttcttcttcctcttcttcctcctcttcttcttctttctcttgtttctcctcttcctcctcttgtttctcctttctcctccttctttagaccagatcttactggcctggcactgaaagaccaggctgaactggctggcagtgagcccagataatctacatgtatcaccaccctagtgctaggatctacctgtgtcacctccctagtgctaggatccacctgtgtcacctcccaagtgctaggatccacctgtgtcacctccctagtgctaggatccacctgtgtcacctccctagtgctaggatccacctgtgtcacctccctagtgctaggatccacctgtgtcacctccctagtgctaggatccacctgtgtcacctccctagtgctaggatccacctgtgtcacctccctagtgctaggattccaagcgtgcaccatctcatttggcttttaacatcgattctgggaattgaactcaggtcttccagcttgcaaggcaagcactgtttcaacccaactgcccgcccagtcctgtttatatttcttcattttttttcccctgtaggatctgcctctacatacttcatccaattagtgtgtacacatctaagtctgggaaagatgtgcttctctacctctgaattctattaaatccatttcaagtgcaccccgctcttccctccctccctgtacctgattattgtggattacttcattactgggcacttcgttccaggtgtagttagatagttttaggtaacatgatgatagaaatcaggccacaggggtggagtggctgtcacccactgctatactgggggctcgtggagccactcagggctggtcccacctgggatagggaaagactaacaatcttgatactggagatatacccaccctcagacatggtgagctcaccttcctctacagccatcctcagcagggtccgatggggacagtctatgcgtgccttacccattggctgctgaccatgtggaggctcttgtctctgcctggagacaagaaaacagctcttgggtatctggtgaagtgggacagtgtattcctggggcttcttaatccctttgaggcagctttgtccaacaaaacctgcagctaccgccacactctgtctgccctgcctgatatggtgaccacactgtggccaccaggcagtggatgcgtggtcagtgtgaccaggaactgaaatgcgtgatgaatcacgtaatgacaatgtaaatatcgtattcgtgtgtggctaggagctcctgggtttgtgtatgtactttccccaacgattttccccggcatcactttcgttttccttggtttcagtttcccacagtcaaacgtgacccacagagggttaacagccataaatacgcaattcctgttttaaactgcatgcagacatgtgggtgggagcagtgtgaagaaaactcttacagacctgcttcatcctgcctagtcacaattccctctgtccagagtatccacactgtatattctacctgcctgctagcccttcagagttgccatctctgccattagattgtccagtagatagtgcttgtgtctaagtaaccttcattttacttaatattggccccagtgcacatgaactgtgatgactttattatacagtatatcgttttaactgggagacttcattaataaccatttgtctcttattttttctaagttataagttcagccttaatcacagatacactctgggaaaaacccccatgttttgggtgcttcctgaagcttcaggcatgccctgaggtcttggagtgtttcctctgaggacaggaggtctgttgtgttcttgtctgtgtgaaggaagtcattctgccatctgactagattgattataaagaagctccatgctctggtgctgtcactgttccagactcctccaaattgtccttgggggacttttagagacacaagcatccaagtagcatgtgcaggagctggccaggccctgacacacttctaggctatttaacgccatatcactgctccttcaagttctggaatttgcttctgtaaatagtccaatggcagctttctgaccactttcagatgtttctgagttatatcctgagccctggttctttaccaagaggtcctcccaactcctcggtgaggatccagctatctgcacttcagcacaactgcctttatcttgaatgctactctgagattattggtgaccatttccatctgctgggaccacagggttctcaaggtctgctcacaccctgcggggacacataaagccatgtccttactctgtatctgaggtggtgatcttttttccccaatgtctatcatccctggtttagcctagcctttgctcatgttttagtcttgtcttggctcatgttgtagtttgcttttctgttgctatgaagaacaccatgaccaatagcaacttagggggaaaagtatttatttcttcttacacctcttccggtcctttcactgaagtatcagatcagctaccatggctcaactgttctatacaagacatgaatttggaaaggcatccccttgacctctttatgaaatgaccatgtgtgtcattgaaggctggggacagagtgcgtccctaaagataatcttcaagtttgccattatccacacatttacaggtgcccttggtaacacagggattgaccatggtgcctaactgtcagtcatgggacattgcataatagcatgtgtgacagtggttatctaggcaatgggggttgggggaggaggcaggtggaaatgactcagttcaaacttcccccatgattatccttccgtctcacctccattctttcaatccccctctctccagaacagggactttggcagtcagttactgtggcagctacatttccagcttgacagaatttagagccatccaggaagagagcctctgaggtcatcttcgagggagtttctaggttgggtttataggggtggggagaccaaccttgaatgttagcagcagcattccaccgttccaccagctggggtctcaggctgcagaaaacaaaggaagctgaatacttgctttcaactctctgcttcccgagtgtgaatgcagtgcccgagtcctgctgccatgcctctccgccccgatggactgaaccctggagctgctagcccagataaagcctccatgaagtagctcttgttccaaccagaggaaagtaactaatatagcaatcctcacttttggaacacgacctttgggtaccattgccttagtcacctgtgtgcagttttatcctcaaagtttttgtggcaggtgtcttgccttcccagctggcactatctacccctttgttttattttttagtatatgcatgtgggcctgagtgtatgtgtgtgtgtgtgtgtgtgtgtgtgtgtgtgtgtgtgtatgtgtgctccgcctgggtacatgtgccttcagaagccaaaagaggacttcagaacataggtggttgtgaaccatgcagtgggcttcctttgcaaaaacagcaagtgcttttaaccccagcccacagcttgtgttaccctctgagactggactgacaactgggtggctcatctcatatccccagggcttgggggtgggggcggggtctttgaacttcactcaaagtgcctgctcacagccatgctcgaggaagggaacatgaggcccagtgtacaatgctgctacccagcatagacatggaccttctgggcgacatgaaaactcacttgtccaaacatatctcatctgctgtttatgctcaacacaaacctcacccttgctcagagctctgaacacaacagactggccagttggaggaaggacacatgaccacctctctgagatcctgtacaggcgataaagacaggcagtgctcccagctcctctcacccacccctgcctgtgtctagcctccaggataataagactcctctccctatgacaatttgctccttctggggctcaagtggaaattggtgtcaggggttgggtgtcttgctgaaataggtgtgtgtgtgtgtgtgtgtgtgtgtgtgtgtgtgcgtgcgtgtgtgtgtgtgtgtagtgtgtgtagtgtgtttaggaatggcagagagtaagagttaccactgtagccaatgcactgtaaagtccctgtccccatccctgtccctgtccacctctcctgatggaagcatggtgtcctttgggggtttcagactttgatttcatctcctgaagagagtaagagagatcagccatgatgcctaaactgtaggtagggaatcaaatttctttggaaaattgaaaagggcctctggttatggaggtggtgagaaactggtgttcctggggcacacttagtgggtcaagaatgtatgttaaaggtccattcagatttactccacacacaaaagtcacagctaatcaaactgagtgtccatgagaagtgctagcctaggggtagatgcagaattcctggtcaccttgagcctctagtgagctgcgcatacccaactttggtggattctgttttctgagactgtacgggcgcgttatttctcaggaagatggctgttgtcctggccttgggctgaggcaatctttctttgacctcagagaattgaatgaaaagctttgggatccatccaaggctgtcctaggcacacttccatccagctgtccttcctgccttacctggaaaggggccttcagagccaccatactgatttgctgctggccttcccagaagctcttgagccaagcaagaggtctctttgagcctgcaaatgaaatgaatgaagaactagaaggtcttgctttaattcatgtttttatataagactttaaaaaaaatggaactgtataaaatggtattcagactatcatagacagtttaagtggtaccggtgactgaacccagggctttgtgcatgctaggcaagtactctattaaatgagctatatcgcaaccccaagaaaagacaataaagtccctccagagaaggtagggattggataacagggaaggcatagtggccattctccagtctctagcccagtctcagggggccattgtgataagctgtatcaattaagagtcagcatcagatatgctcttggggacctgtgctccagccctgagggtgataatctgatatgaagcaccatgtgctttgtgtgagaccaaaagccaccagagtctccggggcacccagtgctatttacaaagcagatagaatcaggactatttcagtagctattgagacatgctcgcagtctgcctgctggtgtctgccccaactcacctcactggaatgcaaatagggcccgtgtgacttcctgaaggttcctcagcgcatccccaggtgacatggggttatagagaggaatccatgactagcttgtctggtgccttacagagactagactgacaggagactcagccaaggaggaacgggctctattcagcgtgaacagagtgactaaaactcttcactacgagcaactttgatcttcctgagcagggacattgaccctgacagaacaggaagcaaatgggtgcttactggaggggattgagttggtgggagagaagtgagcaggagtcacaggctgtgaggcaccaggtagagcctcagtgtatgtctgggattgactatgtctctgaaaatggatatgttcccagcagcttagaacatgtcctttttctataacagtgccattacagatctaactacctcgaacaagggcctttggagtaggatgactggtggcgttagaacctggggctcaaagaaatggctcagcggtccagagtgctggctgcttttccagaggtcctggttctattcccagcactcccatagctcacaaccatctggaattccaggagatccagcatcctcttttgaccttcctgggctccagacgttaatgtggtacacggatatatgtgcaggcaaaacacccatacaaaacaaaacaggcaggtggacatatatacccaggtcctaggaggctggagacaccgagcctcagccaaaggatcaccagaagatgagggaaaggcctggagcagacccttcccttggaaggcacacagcctggctgagcctttgcctttggcctctaaccttcagacctgagagacagatggctgctgtgcagcactgcagagcctcagacctagcgtttgatcagagcgtgtagctcgtatgtgtttcaacatgcggggggaggggtgctccgaggagtctcaggtccacttcagtgtggattagctcctcgaaggctgtctcctgacagtgagtgtgtgctgtcagcctgttagcaagaaatcttttttgaatatttaggtgaatcaaatagtcttgctgtgtctacatttttcttaaaagtaacagcaattcaagaaaaaggagccatgatttttgaaagaaagcaagggggatgggcacatgagatgacttgacaggaggaaaggaaaggaagaaatgatgtaattatataataatctcaacaaataagaattactttttaaagtggctgaataatgagaggtttgaaagtagattttggacttacatttgctaagaaaagggggggtgcgtgaaaaaaggaaaggtgtgtctcttacttatacagaacagggtatcctctggggggtcctgagcccagggctggtggctcacggcggctaatctcagagtctcgtaccatccgaactttcacccactctgccgctctcctttccctttctctgaagtccgagttcctcagggagccagtgatgcttcccccacaggggatggtttccaccgagcaagcgaggaccactctccaagggacagcagcagcagcagcagcaagataggataacttttggcttgttgcctagttgttaaaccaacatggtggagaaccctcagaaacacaggctccaacagcacattcagaaaaacaggaaccatcaattcatgagaacttgtagagaaaaatagtttaaagaaccgagaaggtgccacattatagtgaaagagtgctggtttttagaagttacagaaatgatctcgcaggccccactgaggcagttacacaagacgtaaccgcacacaaacaagggtgtttcttataatatcacagcatttacaggcaaggagctgctttctgagcatttcgtggaaagttattttagtctcgggactagccttctgccatgagtatttttcaaggatgtgaaactttgacttcaaagtcagaaggtggggagctaggactcaaggctggacgtggtctgtacagcgggtctctggtggcaggctgccagccgggtgtccccttgcactggggttcaggaatttacaggtacctgtcctcttctgaagttagggggatactcttgtggccaagcagagattgtttccaccaggggcctgcagaacatagccatttcctacataaatacttagcaagtcttttcctgtaaaatgggctgttatctaaagcacagcaaaagctgtatgtttataagattgagtgccttgctggtattctgaggtaactgctaaagagacatcaaagtatgaggcaaacgatgtcctgacaacagaggtgcccaagaagccaccactccaggatctgaggaagtcaggacagaaagcagggtagcagtgggcagcccaggagagacagatatgcccagtgctggacacaggcctggacacaggccaggcccagggcaggcaggatcctgggagaccagtggactctcaatgtctcagattcaagtacctgtgcactgaaaggtagctaagcaaaagccaggagaaaataggtcttatttttctgggtccctcagtaagtggggaaacggaaagataacctcgcataagaacgcacacacctatgaaacagactcacgatgcagaagatgggggatctaaagctctggagtgtgccagaagctgggatctgggctcacactggagccatcctgggagccaccagtcaaagaggtctttccagattgttctgcttcagagttaagtcccgcactctccggctctgagccctgagcccatgacagatccaggctcggctggcctctggaacgtacatcctgtgtaatttcaaaaaggtgtgtgcttgtttaaatgctctgtggcctctgtcttgcatctctgaatgtatgtctgatatgcatgtctgtgtgcaccttctggagccctgcttctcagcttttctggaaggagcctggaggtgaccatctcagctcagcgagccccctgcatctgtccatctcctccccactccccagcactgagattacagatgcaagccgccccacctgcctttgcacgtgggtccctcggatctgaactcaggtcttccagctgcgtagcaagcacgttgcctattgagccacctcccagccctgtttggaaacttactttttaaacatggagtctcgcacactcagttttgttgttgttgttgttgttttgggatttttgttttgttttgttttgttttacctaggctcatgcctaaagtaaccaggcccggacttggtcttaattcctttcttgatgagcctacatgagtgtcctcctgcatctgctctagggagcccctgctgaaagcagagccagcatagcctttgcaacttgcacttcccgccagtgcacaaagtaacagcggctcctgctgatttatgacacgtgctgtaaaagcaatttacatagatgaagaggcggggatagagcctgtggtaaggtaatgcctcctcccgaggtcaggcctctagatcggtgactcagggcagccaccaggaggcccgtatgtactatggaaccacagcctcgtcctgaaacatgcagtatcaagggtctccccggttaggactccaggtccctggaatgttggttacaggggtggactgttgtgtatctccttctttgtctgtcaatttcagactcccctgagaatgaggacgtgggcttctgctctggacccttctcttcccatcacacacttctactccttgcccatccccacacctcgacacttcaccttaggcaatgggagcagagacacaccgtctgaactcagggtctgcccctccatgttcaggaggtcagcatgcaaatgaatacctccttagggagaaagtgctttacaatcacacagaaagctccacaggccataaagctaccccttgcccccgctgtactctacgaagcccacagctgcaaggcttggctcatctaacatggaagcccatgaaattgggacacccacacagccacctgcagctccccccacccaccacgtgcccgcgcgctgctgggttctttgcaggccacctgttggtcggttgttctactgcagtcaggcctgcggaggtgttattggaagtcagggggcgctagtgagctatgggctgcaattctccacaaagacctacagttgggatgggactggaaagtccagatgagccaatagaaatacatactttttttttttaagctgtaagacttctcaggacctttggtcacgactcacaagtatccagacactaacacagcagagactgtgcagcagatgttagatatggctaaagtggaaccctcctccacgaatggctctgttttaaaatctcataggacctgagtttcaaagaatgtagtgtaggatgaaacatgacggctgtaaaaggcgagaagggataagttgctaggaaataaagtgacaaatagattgaagtaagtgttcaaaatgggaaagggaccaggaagatgactcactgggaaaagtgcttgttgatcaagtgtgagggcctgagtttagatacctagtgtcctcgtaaaggtggaatatatctgtgatccccagtacaaggggttagggtcaaaacaaggcagatctgcagagctgggctaactgaacaagttagttcaagtgcagtgagagaccttgtctcaataaaacagggtagagattgataactgtcagtcagcctcatccttcacctgtattaacctgcacacacacaaacacacacacacacacacacacacacacacacacacatacacatattacgtacacagttaaaaattaataaaggtaaaacggggaagaatcctacagaggaggaatgacatggtggtgtggtggcacggcagaggagaatgactggcacaactgggcacctcactcaggctgcggtgatggggagacatctgtgtcaagctttggttgccagagcctggtatgggagtctctcaccttcaggctgcacacttgggggtgcttgcaggttattgggggggggttggtgagcaaatagctttctaattaagacgttgtgggcggaattataatgaagattgtcttagtcaggatttctattcctgaacaaacatcatgaccaagaaacaagttggggaggaaagggtttatttggcttacactttccacattgctgttaatcatcaaaggatgtaagggctggaacataagcaggtcaggaagcaggaactgatgcagaggccatggagggatgtttctcactggcttgctttccctggcttgctcagccttctctcttatagaacccaagactaccagaccaggaatgccaccacccacaatgctgccccccaacccccttgatcactaattgagaaaatgccccacagctggatctcatggaggtatttccccaactgaagctcctttctctgtgataactccagcctgtgtcaagttgacacaaaactagccagaccctcagtcctcttggaactactggctttctgtgtgggactttggtgcgacagaaagagcctgtaccctgcgcttgggagacaggagaatggacgcacaggagtcacagtcccagcagaagcgacaacagagacaggtcgacttttgaaactccaggccactctggtcaggtcaatatttcaagaacccagagcagatggtaccacctgggcctccatttgtgcggatgaggctagagagggtaccatgtgtgagggctaggcttgggtggcacagtttctttcatggaagcattaagaggcttacaaagtggaagtgttataaaaatcagtgaaatatctctaagggactacccctcgattccccaagtgtatattggctgagcagccaccaataacaagtggggacacctgtgtgccagatgataccccagccaccccttcagcaagggtgttcttttgtggaacatggagacagcgtaagacaccttcgccatagctccagtctatagaggagacgaggctcactgtggtctgttgccaggatgggtgtgaagaccttaactactgctggttagcagctatagacccagacaacaccagggaaaataaaggaaataaagaacactctagttgaacccaactctttttgctgtttagaaccagcaaaattaggactgaagagatagttcagctgttaagagcactgactgctcttccagaggtcctgagttcaattcccagcaaccacatggtggctcacaaccatctgtaatgggatctgatgccctcttctggtgtgtctggtgtgtactcatatacataaaacaaataaataaatctttaaaaaaaaaaaaagaaccagcaaaattgtctccttattgagttgcatgttctagaatgtcatcccaccttacacagaagttgttcaaggaagagaatgcagatgaaaaagtcaaatacactctgtggtttcagaagtcatgagtttcactcctttgtgttcacatgtgggacaaagaacgttctggaagcattagtttttggaccaaggctcatatttgcggtgaatgcatccctaccctgtgtgcctcccacaggagtgccagcaggtccatccctaccctgtgtgcctcccacaggagtgccagcaggtccatccctaccctgcgtgtcttccacaggagtgccaggaagtccatccctaccctgtgtgccttccacaggagtgccagcaggtccatccctaccctgtgtaccttccacaggagtgccagcaggtccatccctaccctgtgtgcctcccacaggagtgtcaggaggtccatccctaccctgtgtgccccccacaggagtgccagcaggtccatccctaccctgtgtgtcttccacaggagtgccagcaggtccatccctaccctgtgtgccttccacaggagtgccaggaggtccatccctaccctgtgtgcctcccacaggagtcccagcaagtccatccctacacactgactctctacagtctttgcaaacacactgatgcccaagcactgtcgggtgcaatcctacaagcacatttgtgtgtgaagctagatccttttcaaccaaggcagtgagcaggacgctaccttggttggctgaggggctctggggcaggtgttgtagtcagtgtccatcctcaaggacaccaatagccatttgctttgccactaatctttatggctgctaacaccctggatacacctgctctgatatgaaatctgctaaaatattcctgtgtagtgattagggaataatactattcaaatactgaaaagtcatactcccaggcctcagcacactggccaggatgtagcccactggtggagccacttgcccagcttgggttaagctctggatcctgtcccatcgccaccagaaaacaattcatctcagtgcagtgagttctgatagatatgaaatgaactagacaggaatttcagtaaagatggttgatcactatggaaaagtaagacctaagcagtgaatggcttaaaggagggaggatactccagggctctcaatgatcaggagtggacagtgactctcctgtggatttgtgctcagtcagaaaagaagcagagtccagaccaggccttgagtagcaggtcaaagttatgtgcagaagtgtcccaggagggagtaacccctctgtgggctaagaaggccgtgtgccaggagggggcgctactgtctgtgtctgtctgggagtgctggaaggatcaacacactgggctgatttctgaagcacactgtgtgtgtctgaggagctactccaaaggcagagcttgaaattcaaacgtgacttccaaggcacggggatagtttgaattatcgagttagtcttttatgaagcctttcagtgtgcaagcctgcgagagttcagaagtgcagaggggttgcacagccaagttcactggttctgatagtaagaaaagtccaagtgtatctggaatgttctttctttcacctcctgtgctgcttgtttttgtcaacttgacacaaacctaaatatatctgagaagagtgggaataagtttggcctataggcaaagctgcaaggcattctctggattgatgattgatgttcgagcaccagtccacgggagtcagtgccttccttgagcaggcagtgttgagtgtactaggaaggaggctgaacaagacacaaggaatgctgttcctccgtggcctccagattcccgccccgagtttctctcttgacttcctggatgacaggcttataaaccctttcctccccaagttatattcgtattttatcacagcaacagaaatcctaagacttacagtgttcacgcccagaccacctcctggggtctttttgtgtcctgggcactgttctgaccctgtctcagtggccacgcttggttcagctgcttctttccataactccctgtggttcacttgtaccatttctgttaataactgagattctcatttctctctttttgttacaaaagcccaacctcctgtatagttagggttttgtttgttagtttgctgaacttaaaagcttggaacctgacatttctttactaaactctactttggaagatttaagtcatcacccatcacccacatctccagatgggtctggtctcctgttctcttgtttagaattcatgtcccacctgaggtcagtcctaagcagatctgacaggttaccaaatcactgaacaggtgacagaggggacgagatggaaagcagcaatctggagtgtgactacacagatgtggcccacgactggtgctgttcagagttctagggccagagccaggcttgaggtcaaagcagaagaatcctaagttcaaggccagcctggagaacttaacaagagtcagtctcaaagtaatagaatgaaacaaatagacaaacaaaactctggggctgtagttcagtggcagggtcttgtgtggtgtgcttgaagccttgagttcaatctctactaccaaataaagtaaaaataaattaaaataaaataaaataaaaaagagccagagatcttgctgaggtcttacagcctcttacctgatttcctcacttaccctgccttgatgttttaccataagaaaacaggctgggacctactttactgggtccaggaacatggacaccttttacgaaatctcctaaatcatgagttttggcaaccagttttagaatttaagttttaaacgtggagctgagagtgcggctcctggctgcaagtcactcagagacagaagcctcatatctgcttcgtcaccctgatatcctgtcctctctaccacatctgaagttcctctgctgcctggtcacactccctgtgtcttctcagtgcccccattgttctaaagctgcaaactgaaacaagtctgagacgacacattgggtgtgaccaggcccagacatctgcggtccttgcagtggttaattgcacgtgctgactgctagaaaatggttgctggtatttagtccaatgttattctgttactctgtgtgtgtgtgtgtgtaagtgtatgtacatattcatgtgagtgtgtgtatgtctgtacacatgagtacacatgagtacacatgagtatagaggacagagctcagtacaggtgtcttcctcaataactctccaccatatgtacttatttatttgtttatctactttgagataaggtctcttcctgagctaagctagctaaccaacgaactacagggatccatctgtctctctgcccctcgagcctgggttctagacaagtgctacaacacccagcttttatgtaggtgctgaggctaactgaggtccttatatttgaactacaggtcctgtaccagctaagcctcctagccagcccccaattctcttaatcacttttttgcatggtaaataccttctgatatagagctatctcacaatcacctttccaaattccattactaatctgtgtgggtgtgggtgggtgggtgcttcaataccacagtgtaagtatagcagtcagaggacaatctgcaggggttaattctcttcttctctcaccatgcgggatcaaactccggtcattgggcttgccggcaaatccttttacccactgagctaccttgcgggcccctctgtgggttttttttttaaatgtttattttataagtatggatgttttgcctgcatgtatgtaaggtatgtatccatggagcctggaagagaacactggatgccctggaactggagttacagacaatccataagcctccatgtggttctgggagttgaacccagagcctccgaagagcacaagtgctcttaattgctgagccatctctccagcctcatcccctgtttcccctaaccccacactgctagtcttgatattgctgtgaggtaatttgcaagatgagattaccacttatatcaatgggccttgatcaatcagttaggggccttcagtagaaagactaacctccaagaaaaaaatgccccagagtctcaatgtcccaccactgtgttttcctaaaccccaaaggactgggaattctcagcatttaatgcaacaccgcaggaagagtggctcctgcattaccaactcctatggctctgtagcctgctctgtagcctgctctgtagcctgctctgtagcctgctctgtagcctgctctgtaacctgctctgtagcctgctctgtaacctgctctctcatgtgggcttgaatccgcaccactgtgcaaaccagccctttaaatctaaatcactgtctgtgtctgtttgtctatctctctctcatgcacacatatgcatgtatatctcctgtgggtcctgtctctctggagaagcctgacaaatgtggtcgtcttcccagaattaacactgttctctgtgacagacagaatatgcatgggtataaaacaagagcagaggtggcctatttccctttgcaactaagttcttttacttttctctagcttatgtagaagtgcattttcctgagcatgttctaccaacttccatttaaaaactcataccaatcatccactcaggatggatggctttggtccccacaggcaggggacactttctccactagactgtgtcatcctagattttgttgtttctctcagcatctcttcactgattttattctctaatgtttaaaacccctggagttgatagcatcctaagattggcggcttgaagaaacaacatttatttacataaaatttaacatacaggtaaatatacttatacacatgtgtaaacacatttaagttcctagagattcatttgagggcagtgttttggaccactgagtttaggggaggttgcttgcttgagcacagacgggggacttagagcatcacaacttagtggccacagcactaaaacaaaacaaaacaaaacaaaacaaaacaaaacaaaacaaaaaaaacagaaaaaccgttaatcaccaacagccccagaagaatgagtagggcttgagatgaccatcctatctgtgaggaaatgttgggtacccagccttattcaggtaacccgagttgcggagagttcatgaatgcagtgaccacatcttgttgaagagacagtgtttcacggagccctcctcattgactgcctcttacattcttcctgccctttcttctccagtgttccccagacctcgaagagggtaacacttatgctccatttagggctaagctgttgacagtcacttaatcagttatgagccttggcataaagcagggggccgtttttatagatgtcctagattgtgacatttatttgtgatgaccgaaagaggtgctgcgtctaagaatattgtgaacacactaagtatgtgctgtggctgatccagggatcctcagtgtgccacgggaagtcagagaaagtgactgtgccacccaaaggtggtgagaaggtgtccggtgggacctctgtgaaagccaaactgcactccccagctcttaccaggccagtctgtccacacaggcaggaggggcctggcagctacaggcctccttgcacacatcaggaaaaggaaaccatttgagactctaagggctcagagtatgggcagactgagagcacctggtggttctgcttgccctgtggacctaatcatgtatgaagatcgtaaaccatctctgagggcaaagttgcctgacctctgcaaagcattggttccagcatccttaacagagacaaacctcactcccgtgcataagccctctctttctgagctggtcaagagtctctgtaggtttttgtcttttcaaatgtgcccacctgactggaatttctttgcactcaggctaagtcagagagagccatctttctctcctgcagctgtgagttacacccaacacttgaaaatgaaaccgagtagtaagaggggctgaggaagagtgttcctgacgggaacagaggtttgttatccagaaaatgacgtgagaagcactaggggaaacctagggcatctcgtagccaggcacacaaggtcgtgtgagctgacaatctaattattctggtcctaaactctcgaaagaaaaatcccaagccagcatttgacacagtcatgcaggaaagcccgcttctgcacctccatgccctcaatcaaatcttacaaacactactctgggctgcagattttgttttttgtctgagtggatatcacctcggatcacttgcattaactgcaggtgtgtgatgcggacaaaatgattgccctccctacttttagaacgtgccttgaatgtgaagcaaggaattgttttcccaaagcccacgggactggagatttgcagtgcagatctgcagagcctgtggctgtctgtccactcttgggggccccagctccccttggactagtgccaataagcctctgaaatggagggtatcctcttccttctgccccactccttcccagcccaggcacgtcgttgacactccatttatgtgagaagcttggcattagccgcagggcttcactcttgacacttggactaattctccactttatattcgtgattgcccttctgaaaggagaatctgctgccaatggcacctgggcatttgaaagtaaatatgatgcaaatactgcctccccggcacattccctcctcaactttgggatgaagagtgaggatgagaaggaggaggtgagctggggtgcccgactcatttgcataatggtgtttgaggctgggtgaaactgaaaccatagcctgtgtgggtggggccttgtttctcctcacagctgcccccaccccccaccccagcagccaggccccctctaggctcctacagaggcctagggatggtgaggcccagggactcagggcaccagtgcgaaaccagataaaacacctggtgctcctactggccacaggcccgctgctgagctctgtgaacaagcatgggggggggggggtgtcctttttttctgattcagattgcaatctattggtggggcccagcgtgtggcagggtgagcctttgccaggagagccaaatcattttgatcttcagtggaatgctctcccagctgagttatttttgacactgtgaggcaaggcttctctcctccagtcatttttcagtcaactggagtcttcccaatccccgtggctgaagcccacagattaagaggggacatccagctctcccgtgcgataaatggcttttctacctacttggtgtctgataaggtatcttcactcagaagtaatgtgaaagtccgacagttttacagatcctgttaccgttgctgaataacgtctccaggtggcaaagtgagttcttgtaatataaatgaagccagcgtgtttttgctactggactgatttgccctgaggacagggttttccactatggaacccatccccctgataggtgtggaagagtggaagccttttatatctatacttccttcgctctgtctttagcttgctgtgggttcatgtccttgttggtagaaagaggggatgacctctctactggagttttcacgtgtgtgtgggaggtctcagctccttttcgaattctctctgaacattctgaaatccgttgacttgtcagacattgggaacaccacgctggcttagaagagcatggcctctttgatgaaagctttcagtccggagcctctggtgatgacgttggtaaccttaaacttgttcatggccacagtggaattcatgtgggttttccttaatggcaagataacggaataactacagagcgtgtggccgtgtggatgcagctggactctggctcagaagcaagagttgcagtttcctgggtgctccgaagctggctgggaaggtcccaaggatgtggtagttcgtaggcggcaaaggccccaggaacttgcagcttaaatccatttgtacctgggacaaatgtcgtggtcctggtttccagtcttccaaggagagatcagctttgggctgtctgctttgtatttgaagatgtttttattcgaataatgagggggaaaaaagggtgctagtttgcccaggcacaggaggtttggttttctgtttgtttgtggggttttttgtttttcagtactgagggtggagcctagggcctcgctaacactgagaagcatgcaaccactgtgctatattcctgcacacctgcggctccgcaaaacattggtgtggtgctggctttggaaacctatggatgataccataagtcagaaacaggaatgtcgtatttaactaagttctaagttgtgactggttggtattattttacctataacagtttgaggtgaggggagagtggttttaaaactagaattgagctgccgtgtttatttccctagcattccccgggtggttatagtatccctgatatcttggtgacataaaaaatagtgactgcccctgacggtggcgacttcacggtttggaaggtaaacccagcacccacactcaggtttcctgaggatcacatccacgctaggctgcaggctgcacgcaaggttcaatgtgtgaatcatctcatttcacggtcacagaatccacaagaaggttccagtatgactctgtttcatagctgagagaggtaaccttcctgagatgacacagcgtgtagctggcagagcctatacatgaaggtaaacagttggatcagatttcaaagagcatgcccgtaatcaccatttcagtgcccagaagcagcaagggcagagaactcagggctctgtctatgagtgaaagcataaaaccccaaagactgttttcatcatgacactcagatagttggaaggctttaggctttgagcatagtgagagagacaaaagatgccaagacaggtggagggggcactgggtgtccctagccaccccctcagcagctctgatcagttaggaggctcgttgtcagagaataagcatcttccacaggaatcaagcccttgcttggtgctggctgtgtccagcctccctcgggctccttgtgcagcaagtgagtgctactgtggtggaatggagacttttcccttccccctttatggtcttccctggggaggagaagcagcattgggaagaggtgctgggctccgtgggggcagaaggataagtggtcagggattccatggaggaaaagacagtagctttggggagagactatccaggcaccaaccaaggctgcagccagtgtgatggacaggtgggaagggctgtccacttcggagcgaggctatgcttcagccatctttgactccttgctccctttcttttccttcttcatcttctccaacccaggatgtcttactggtgcttgccatgggcaaagtccctccccagcctgagtttctgaggcaaaaccagaatcccagtgcctcggaatggggctgcacttggagatgaaatccaggtaaaatgaaaccaatagaccaatggaccctaattcatcatgaccagtgtcctcctaagagatgaggacccaggcatgtgcagtggggacagcgcatgaagagcgggtgaggacccagcatccgctagtcaaggcgaaaccagccctgctcacaccttaagtctcagtgacagaatatctgacagaaacaatttcagatttattttgacttgtggtttcagaaattccgggccaccatcgtgttgaggggtttgcctatgagaacgtctctctgtcaccatgcaagccatggcaaactcttcgtaggaattaaatggaccctagtggctccatcaaccaggcatcacctcctgaagactccacagcctgttggtactcaaagcatgagcccgcagagatacttggcgtttagtctatggccatctcagatgtccaggcttcagactgagagtcagtgtttctgttgctgcagcctctgtgagacttaaagtccaagctgggggcagggagctctctgtacccagagccatgggctcagtgaggctctggagccctgaggtagggagaaggtccttgttagagagttgggtgctgtggatggatgggtttcttaacccgatcagtgttgactcccagaaggagctgcagttccatctgcaggtaaggttgcgatgctctgctctgattgaacagaaaacagcccaagagtgaacaagctggtctctaaggcattctgagccatactgtagattttcaggagacaggcgaagatggaggaagagctaacatgtcccctgtgtgaggtggagacttctgttgttagactgctctgttccttgccttgtctcctgagaagagaaaaagctaatgagttggctgctgtgttcagaaaccacttgtagaggaaaaacaaacaaacaaacaaacaaacaaacaaacaagggcagcccatggcacctgtagcctgacagggcccctgtggtcaaggctctgtcactaggctggcccttaacttgagtggatattggtcttattgtagagtctcagtctaatgacaaggcctttaaatttttgattgatactcagtgatgaatgaatgaaagattggggcagatcgaatgcctcctagtagagttagagttatgtctgtgaagcaaatctaaacccagaacgccaagaccatctttaaaagtatgctttaatcaaagttggagtcctgtttactttgctgagcctttccaaaacccttattatccttagttattgtgggcttcaacaaggaaccaggaacaccaggaagcttagctgtgtattttgttccatgtagaaggcagaaggcgatctacgctcaggccttctcactttctccacaggacactgagcccgaaagaaaacatgatacccagggtagaatggagttgatgtctccaaaatgactggatgaagacaatattgaaaatgagtagagagctgacagttgtgcgtgccatgtaatcaaggtcattgcctcaattgtgttttactatgccagttcgtggggctccttctatttctgaaggctgtagcttccacagtaactgcctttgtagttcttggacaactagagaaggggatcagaggatctgcctgacagcctgggaggcacttctcggtgggatttcccagtgttaaagaacagaggccccaggactgtgcactgggtttcctgggcactttggtgcatctctctgtgtctttagttgaatgtggtagactgttaagtgacacgggaacacttggttttggaaagagaaatctacatttactgctttctccaggggaggtgggaaacatgtttacttatttatttagggacagagtctcacatgccccaggctggtgtcactgtgctggcaaggatgaccttgaatttcctatctcctacctctcctttttctgggattacaggtgcatgccacagtttatgtggtgttggagagtaaacccaaggcttcctccacaccaggcagacattctagagaccaaggggcaaccccgggctggacctgtgattaggagccttgtgggaaagctgggtgtgatggcacatgctgacagtcccagaactcaggaggttaaaccaagaatggggcaggctcctgtgttatatcacatgttttattacaatattaacatatacttattaatatcatgtatttcctactcaagacagacacctatagacgactttatcatctcaggaaatcacctatcaacctttttatgtctgtttgtttgtttgtttgttttgtttgttttgggtttttgttttttgtttttgtttttcgagacagggtttctctgtgtcctggaactcactttatagaccaggctggcctcgaactcagaaatctgcctgcctctgcctcccaagtgctgcgattaaaggcgtgtgccaccatgcccagctgtttttttgtttgtttgtttgttttttcatgagatgttcacacgcatattcccatggccttgcttagagggtcttttgtttttttgagatttgtttttatttatgagattatgttgagtatgtgatagtgcatacagaggccagacgtggtggacatcctcctgtagctggaaattacaggcagttatgagtagtctggtttgggtgctgggaacccaacttgatcctttggaagggaggcagcacatgtggttacatggtaaccacagctcctttcccccccccccccccccggccctttgggtggtttttaatgttaattttctcattcacatgaaaatggaatggataaagaaacaaaaggcctttaattgtgtgggctaacaactaatgtgtctgcagacagggaaggctgcagcagagttgaaatgtgtttagtgctggtcaagacaagatagaccaaccagaataagactcaaacttggaagccagaacaaacagtctctgaataaccgagcgtgctagaggacttaaagtgacctgagtcatcacaagaacaaggaaggtcaccaaatacaacaacagttttgcttgctggctgtaattataagaattccccgcatgttcatctctgaggatgatgagagacgtgtgcacatgtgggtggggctggagagatggttcagctctcgaggaggacctgggattggtacccagcacccacacagcagctcacaacactccgtagattgagtccccagggatccaacaccctcttttgacttcatagggcatcaggcatgcacacttagatacacacaagcaaaccacccatgttcagaaaataaaacacataacctttcttttaaaaggtggcatgtgaggtcagtggtcccatgaccaccagctgtgtggcatgcccctcacttttattgtccctgagacttttgagaacataggcttggaagagcagcatgccaggctgagggaaaggctagaaggagtctcgccagggctcgtgtttgtgtgagaagtgcaggcattcccagcccttattcacctctgagcatggaaacagcgggcaccttgcgtttgtcctttccatcacccacccaatctccgaaacagatgggcggacacttaggttttcattgccttcatgagtttgccaaacaacatacaaagtcttaccagtgaggtgtatagaaatgaatactaccattcaaatgtgcagaaaacaaacacgcttgtttatctgtaaaaaaaagattattggttcatgtatggtatgtgtgtgttcagatgtgtgtacctgtgtgtggagtgtatggacatgtgtatgcctgtgcatgtgtgtgcccatgcatgcgtgtcctgatgatacctcaacgttactgtcttcctcaattgctctcaaccttattttattgaggcaggacgagtcaccagacccagagcttaagctgagcagtggtggtgcacttgggaggcagaggcaggcagatttctgagttcgagaccagcctggtctacagagcgagttccaggacagccatggctatacagagaaactctgtctcaaaaaaaaaaaaaaaaaaatcaaaaaacaaaaagagaaagaaagaaaaggaaaaacaaacaaacaaacaaaacccagaggttatcagctggctggctaggctgggcaagtcctaggagctgtcctgcctctgtctccctagctttggagggccatacctgttatttatttatttgtttttaatatgcctgtggggcaagcattccactaactgaaccttctccccatctcctttttaaaaaaaaaatctttaagatattttataattttgatgtgccaaagaattccactctttttgtttctcaactttcagaagttaataaaggcctgcctggagttggtttggtgtaaaaatataatccccttgtatttgaaaactgtgtgtgttattgtgagtaggaccgtgcatttgccacccccatgtagacttttgttctgctcttagataaaacactaataaacaggaagctgaagaaaaaaaaaaaagtgatgcgattgttctgaatgtttttctgttaagggtgtctgggccgcaccatgcagtgccattcccggcaggccctgtaggtggcggtgttgagaaagaaatgaagcagcctgagcctctccgcagctgctggcctcccgctgaggcttgggctcccggccctaaggagcccgctccacttcccagcactttcctctttatgtgtcccaaacaaagttgtaggatatcaaggaggagaagatggctgttcctgtggaaaatatatttttcttctttatttttcatgttgaataacaaggatattatatttcctcaaacccttgcatgagggtgtgtgtgtgtgtgtgtgtgtgtgtatacatgtagcagaacacaaacaatttaatagcaatatgcatccctttgtttgtttttatgacatggaattatccacaatctgagactgttgtgatttcaaaacactaagaaagtttgaagttttatttcctctatttttttaaggagtgactttaatatccacaatgaccattgcctttgtctcattatccacttcaagattaaagtctaccctcaccttcccaggccctctacctttctcgagtcctggcccctgtcagctgaggggtttggaggctcttgcctctgagagcacacagaaggtaaaaggaagtgaccctcgggtgtgtccattgtcccgtcaaagcagagccctgggctggcccttctgccttctgtggcttcccacttctctgtgagactgggacacacaacctttgcctctaggactacctaaaatggtcccacctccttgtttgtgtttttccatagctgagagaccaggaaggaaacaggggtacaggttgctggaaatgagagccgagcacacaggagctacagtctggacagatgccagtccctgccagaggcagggcacccacaacactgatgtccctgaaccattcccctggggcctcatttgaacttcgaagttccatgagcctatcaatgaagcccacacactgtcttacctatccctctcctggcttcttagtttttgtgtgggttgctaagtggaacccaatgacaaaactggaagactactatagacacttctacagggctgtgaggctgacgggaggaaacggaatgccagaggtctggctggcttgagctctgtttggttcagtaaaatattgctgttgtttatgtcaaaaagtgggagagaagccaggcagccaagcatgataacagagatctctaatgtcaagcacttgcggggctggggtagaaaggccagcctgggctctcagggagtcccaggccggcctgggctatataaccttatgagaccctgtctcacaagaacagcaagatcagaaaaacaaggtgggaaaaagaccgttggagacaccttgggctctcaatcggccatacccctagaaaaggcttctctgggttcaccctcttggggaagacctggattctgagtaagggatttttctcctaggttctgaggaaggtctcaggggtaagggtttcacagtgaagtttgtgcttacattttatgacagagatgaaaagaaaccctgtgtcctaggctccagcgtatttctttgaggacccggcatggggtcattgttcttagagtctctggctccatttcacagacacgtagcacattctacattctagggttggctatgaagacaggcagtattctcagaactatttttagcattttattttctgttcagggtcaagaacttcacccacctaagtcaggtcccactacatggaatgttccagaaagcaaaacgtccagctgcctgtcttctattctaggcctaagttatttgaattaaatcccaaagccaaattaattctacatactctgctgcttctgtgtcagggacattgattctccagttatcaggggttcttgcagatccctgcaaccacaggactccgaaaccacagggttgcggagaagatatgcagatatcctctttaatggcaatttcagttatgttcattagaaagtgtgatgctcacccccgggggccaggggctgtccatctcagtcactctaccctcccgtgggcctgctttaagtcatctttctctggggtggtggctttcacagtcatgtgagtttggtacatggctgccttgagtttagctacaatatatagtcgtggtgtgtgtgtgtgtgtgtgtgtgtgagagagagagagagagagagagagagagagagagagagaaataaaataccctctgcaaggtcctgtggaggtcaccgtccttaaggactctgccacctgcaatgtggttggacaagagtgagtgtcccagggctctttttatcgtgcagtgacaatgtagggatttctatggcagaagctcgcggggtcatttttaaactcgggtgcattgagcataatcggctaattttggcttttagtacttctgtaattgaagacagacagattgctaattcggtgtgtttgaaacttcctcaagatcgtttgagcagccttgaggccagggttggtcatactttcattttaaacatagttattttccctcggggaaatgagcaggccctgcttggtgtgtggtctggtgacttgttgatttcagagtcccacagtatggacatgaagcctggtggggacggctgctggctcacgggtcacctgactgcctttgcggagggtccagcttttgttcttatttataagaagggtgacaagaggtctttggtggtgtgcctgtgggacttagctgttggatttccagcttaactgtcaaatgcagagtctgattctctgagcttgctttcatcttgttcctaggaagaaatattagctactgcccctttttatgttcttatgtatttctattctgtatattttaccctgcacagctatgcatgacgacaggtcatttgaggcttctgaaagagaattttgttagccaacctcagctttttggtgttttggtttggttttggacaccaagtcactagtgacccaataagagagacagttcagaaattaagacgagttgacatttacctaaatctgactccgtggcctctgtggctctggtttttgtattatttcctcagacaagctgtagcattggcccaacatcagaacttttcagatccaagagcaacacggtgtggactcacttcctgtccgaactgcacggacttaccgactctgtgggctttatgatgcagaagcagtgttcaatagctcataaagtttatatctcacacaaacttacctgtgatattattaattactatttggctgcctagaaactatttttcctgtggccctgtaatacctcttgtggagtaacattgaaaaaaaaaataagtaaggaccctcataatacaaaataaatctgacttgcctttcttgtcacttacagatgggtttttaaaaagcatcttgcctttcctatcaacaaagccccccaccctcccccccgtttttgtcagttcttctatttattttgaaatactaaacaatcgacttcacttgtcctcgcggcttcttatgtcttgggggaatgactcactgatttaggctctcagtcaccaggggccaatgtcaggatccacagaaacttcctgttgtttcgaatagcttccccccaaccccctacaccctccctccttcgaggtgacagagtctagagaattcacagggcgtggggggtgggtcggaggtggcgggctgggttatttgacttctgaaatgagttttaaagtatcagatttaaaagtgtgtcacttaccaaacccaagatgtagtgtgtccctgaggtttcttggtagtgttcttgctcctgtgcttcgtgcaattagaaaaagaaaaaaaaaaaaatcaccttttggtttttagattgtaaaagcatcactcctgccagcagacctggagagggccgtggtgaacggggatttacttattgcgggacagggtagccaataaactgtcaccctctcctgtgcttagggtgttcagggtatttgttaatgttcaaaaaaaaaaaaagtgggatcacaattctgagacaccaagcgtagattacttcatagacaaagagtggaagctggagatcgagatcggcggggctggaagggaggaggtgggggagggagtgtaatggggccagcttcagtttgaaaagacaaaaatgtcctagagaaaggtgctgctgtccattgcgcagcaacgtgaatggaaacaggacactgaaggacacacagagatgtggttaaagtgctcagagtgctgtgaccattagcacagtttaaacaatgcacacacatctgtggaaattgggtgtttgaatcaccgtgtaataaaatattagctagatgtgatttgtaagaatttaccaaaacttccattcagaatggctactctgactatacacatgttgtatacactgtgggtctggttaactaagatgtgtggttttttttccccactttttttttttttttttagaaataaagtttaattttttaataataaaagaaaaaagccaggtgtggtggtaaatgcctttaattccagaactcaggaggtaaagacaaattgatctctgtgagttcaaagccaacctagtctacaaatttagttctaggacagcaaaaaaaaaaaaaaaaaaaaaaaaaaaaatcactctctagctcagagggtggtcagtgtggggttctttgcatccacttcacctgtccctaggtgggctgtttcttcttgctgggattagatcagcctaggatcccaacctttaatctagacatttctgtactgttgttgtctgcgggacaaaacttgttgttttggttgtttgctccagcctgagacaccacaatgccatcaagccaggagcctttcctcgctgatgaagttgtatttgtagtaacgctctcttgtctacagcgaaactgcggctctttcaggaggacatgaaaaacatgtcttgtagactgggtggctttatgtgaactttgaactaggtagaatctgacctgtgacttaacatttttatttgtatctttttaaaagtttttatttaggttctgaggtttgagtcctaagcctcttgcatactaggctaggaggccctctaccactgagctatacccttcttaaagagtttcagagtctcactcagcagcccaggctggctttccacctatgacctatcaaagcctgctgactagctgagctacaggcctgggccatcagccacccctccttcttatgtctattattctcttgtgtgtgtgtgtgtgtgtgtgtgtatgtgtggtatatgtgtgttgggtgttaggggtgtgtgttgggtgtgtatgtgtggtatgtatgtatgtgttaagcgtgccattttactaagagaaatacataaatgagaattaccaacgtaatcttttcttttttacaatgttggaggctgagtcgagggctttgtactcgccagggaagcactgtgtctctgagctaaatccccagtccctcctcgaggtgtctataagtggtctttattagctagagagctaaaacaccatgaaacaaagtccacacccacctctgacctgagaaaactatttcctatgccatttctaggacagcccttcagtctccaccccggcttccactcccctatgagatagtacattctagagccagagccagtatttttgtaaagcccatgtcagtggaatagacactaattatattcagctccacacaagctggtgtccctgtgaccaacaattcacattgttcctgacaggaagcactgtttgaacctaagcgatgttttgtggtagcacatggctgaccactgccagcactaacagtcctgcttcaaggtggtgacaaaatgaagaaattgcctgagtggggactgcagatgccttcacgtgtggcattgctatctgggtgacacaaaacacaacaggtttcccccacccacccacccacccacccacaaatgaggtagcatcgcaaccggcaagacagtgcatctttagatttctgacatacatcttgctggaaaagttggttcacccccatccacaggcagtttaagtattatttggggacatgtttgacttcatgtagattggagactagacatcaaacagcatctgaacacagggtgtgcaatagtgtgaactagtggctacctttgtccttagttgttgagagaaaagaagcttgtatcttctaatctgatgccaacccacccccacctcactcacccacccttactttgttcctcttataaattctttctattagggaccacacacatagacttaagaatatatagctagaaagtacgcagggacagagaatcctagtgcggggagagaaagacacaggacatagctcacaagaattaaagagggtgagctcccccggatgctgtctgagcaggaaaaagaacgagaaagtagctcgcccactcgtgaagattatacccaggaggtatatgaagaagttagcaggctcaaaagaggggtaaccagactaatggggtgaaaccaagagaataggtcctggaatgtaatatcagaaatatgcttccaaacagggggggggggggttgagtgtccagcagagtgtgaaatgggcttatcaggaaaaggaagaaaattacaaaggagggagggagggagggagggagggagagagagagagagagagagagagagagagagagagagagagagagagagagagagatgggggtgatgaggaatggggcaggcgtgttcccctgacatgacagagaaggctgaaacaaaaagctgaggaactggaagatgcaaactgggtttgtggccagagtgaagggaaatgactgatatgtgctcagagtttagccaggctggggctgctggccgaagggacagtattagtgctttagaaaattctccaagcagtcctgtagtctgggttctggagaccagccagccttctctggagcacgcgatgggggttgtggagtcacaagtacaaaagtctatagagcatcattttgaaaccctcttttgacttttcagataaattgcagaatcatcactaatcttaaaacactttccattaaaaccacacttcttaaaagggctggaaggatgccccctcctgctccccggagcctccttttgtgtgtgctcttcccccacgggcagagatttatttcattagcaggggctccctggctacatttacagtccgaggataagtcttcctggcttcctgactgccctgctgctaagactgctccaggaggccaggtagcaaagcaaccttctcgtggtgagatgggttttcccctgtggatgcctttctgcagaacagtgggaatctttctactttatttctgtaaccactttttaaatactctgcaaaataatatttgagtcaaaaaggagtctgtggctctccctgttattctctctgcaggaggttagtgtttgtgataattcccctcccatcttgcttacttcccaaacaatccctttcctttttactcctttttcttctggctgtttatcatcccatcattctactttcttatattctatgtggattatttactagaaagatgtcgcggggttaaggagacagctcggtggtagagcgcttacccagcatgtctaaagccttgggtttgatctcctgcactgaagggggaaaaaaaagagaacattatttaaaaatgaaaaaaaaaaaaagttaagcaaagccacccttcccaggcccacccttactagcctgtaggaagaaaagcagtcagagacaatgattcagacactggcattttctggaggagctcgctggagcaggatcctatcccctcctggagggtatgagcttcctgccagcctctgtggcaaaggaccagaaaagccacaaagacctgagtggcttaatggagtgcctgccacattggacccaccaggccttgcaggtgatcatggctgccattctcccaaagaggacttcaagccgaccaggaggactcaggcagagcaggccttctaactcccccaaggaaaaagacaagtgcgccacaggctgatgagataggccctgctccaaatgtcacctcccccgcatttttgatctggcacgaaatgagtgtggcctgtgtacttttgtctccttgctctctcccttcctccacccctttcttctcttggtttatctgtgtgtgtgtattgtatgtatggctgtgtacacatgcgaatgcatgtatggacagatcagcacgtcttcccagatagttctccatcatccattaccttatcatttcgaggcaggctctctcactgaacctggcactcactgactagacagtctggccagtgaacttcagggatccttttgacccaaccctcccaggataggactgaagatgtgctggaccacacctacttttttaatgtaggtgctggggatccaaacccagtctcttgtgcttgcatggcagatactttaccaactgagccatctccccagcccagttctctcttcccctctgtaacctaagctgacctggaaatcatagtcagcccagattagccttgacttctacatcctcctgtctctgctttgcaaatgctaggattggagatgtgactcatgaagccccgatgtagccctgattctagaatttcagaagcataggaacctcccctttgtactctgtccacctctggtctgttagacacagctcagtgacccagggctgtagagggcctcctggtctttctgagacatgatgtggctacagtaaatggagccattgcttgggtgcttgaagggagaggaggtaccaagcaatggagctaggggaggagtctatgggctgcctgtggctgcattctcttggagatgggggaccagtctaaagtgactttgactcaggcaacagagaaaacattgctcactctcaggtcttcctctccttgtctttctggaagagtggtcctctgcttctgccttccagatgtgggcctggcttcttggagcttgataatgtggggtgaagtacggggattctaatttccagaggagcaaggtgttcttggatgcctgccatgtgtgtcgtgtgtactctggtgatgagcctcactaatcatttccttgtagtgtgttattaaaccccctagagatgagcccttaggcctcccgtggctgactgggaaatgcaggccacacctaaggagctggaaagtggtgtaaagccagggcttcaaaacagactagatagtgcctcagagtttagttatagggcacagttctatggcctgaagccattctatgctgattcccctctctacccttaagatgggctaagtcctgaaatagctgaggctgcctcatctggacagctcctagacatgggtgtgggaatcaggaagcggggctctgggttcttttgccaggagatctgtgtcctaagaaccctgaatcaggcctttctgttggttcaaacaagcttttttttttttctttcagatagacaaatgaacagttaacaggtctgagtacacccacctttcacctcccagggccctgtgaagtttaaatgaagatgtatttttaaaaaacaaaaaacaaagcagcaaacaggagggaacttgcacactcaaagggggaatagtgctgatattgaaataacgaatctaatacgctgcttttggaaagcaggcaagagcccttgctagccagaaagctcccagcttggtcaccacggtgtgtgcttccctgggcatacaccttggactaaccctgcatgccactcagctggcgagcagatttttctaggctccatcccccagaatctttggaagaacactggattaggtatgctagactggtcctggctttgactgaagagattacacatacaaaaaaaaaaaaaaaaaaaaaaaaaaaaaaaaaaaactctgaagataaatgttatttaattggataaacaatcttagtgcagttttttcccctgtgttctatcaaggtaccactggcaaggctatcagggcagtttttgagaattttttttaaatttgagctagtgtccatatggacacatgtctcgggatgtgtgcatctctgggatagacaggtagagaagcatgtgctatgatgcttcaggtagaatacccagtgttggagaggtgagctgactatagctcagtggttctcagcctttctaatgctgcagttccattctgtgatgacctcaccaccaccaccaccatcaccataaaattatttttgtatttacttcataactgtaatttttctactgttatgaattgtgatgtaaataccggatatgcaggatatctgatatgtgacccctgtgaaagggttgtttgacccaaaaagggggttagggtccgggacccccaggttaagaactgctgctgtagtgtctgtcttggaaaggcacagtccaatcaagaagggaggtattcaaatccacagggttcaagtgtctgtgtggactgtagcatatggggcatcgagtggaatggcaaggaaatctttatagtcacaaggacagaatgaggcacatgctgcttgtgtctgtgggccttcctcagtgtttaacttaactgtcatctgctgcaaactgaccgttgttttctactggtttccttctctctagtgaggatgagtagagtacttacattacacagtgagcctgggcaagcacgagcgttcttcttaacgggcctgtctgggtcaaccttaaaatgatagttgagtcccaagctaggaaattgattcatgcgcttcgtcatgccattggtgagcccagcccacaggtactcaccctgtgccagctctgagccaagcatggcttggggaacgcacttctgacccgagccttcccatccttgaaagtcagtcttgacacttgggtgcagcatccgagacacctcaagggtaaggcatgtgtggtacttagagatgaggaccagtctcctagcaagagagacacatctctcaaaacacaaggcggcacagggacctggcttcagtgtgcgatgcgagcacctacgcatgaaccacttgcacatctccaccagcttggtctccaccagcaatggtggccggaaaggcatgtaaggggttaggatagttatattcctaagacagagggaaaccggggtgaagacggagctcaccctgcacttatcactggcaagaagcaaatatatgtcatcggtaccggcgaaattccatgcttctaaatgaatgctgaggaaaacggagccggtttccaagtgacttcttggatacggattgtgggtaaataacatctgcttaaagcttggaaacccagcttccttcggtttgtttttaaatgctttgacagtgtggtttgctttttctccccctcccctctgagggtgggaggggagtaaataaagactgtcaatttagttaagacccacagtcaagctgctctcagagcctgcgggcacccaggttggtgatgacagacagcaattcaatatgaaaccagattcattctaaaggcaccttatccaaccttttgtgattgaagtatatatctcgcatctctctagggcgtacactgctatccttttgaagaaaaaaatgacaaagcgaatgtgtagattatttctactttgtcaccaaactgtgctgagagaagattgcaactgttattctttctgggtgattagggttccttccctagcctagcaacagaatgcagcagaaagcaagcagcgagggctaataaaccaacagggacagtgtcaacagcaaaggcagccatggagggaggggcagaggccagagcagctcacctcgaaggatggctgcctgcctgtggctggaacctggagaagagtcagtcccctgcactgactggattgaagggttacccatttgattgtgcaggtagttgtcacagacctgaatcaagtccaccagaaatgctgtattgtatgtctgtttgtctttctctaagtgagtctgtaaagcagagctgatgatcaactgtccctgggacctctttgtgctgactcagaatgtcagttgtctggtatacaaaggagctcacagaactggtgtgtgggcacagtggagccaagagacccctgtgcttggttggggccaagtaaacgccccattcctcactttggcgtttgagacacagctttagtaacttctagaatgaaggccacaactcaggcaagtagaagagaattcttagaaagtgaagtctgcgtgcctctaagttcacagaagaaatcaaagctactgcttgttactcagaagatcagcacagagcaggggtcatccgtccctgtcattgtccctgagctgctagcttccctgcagagcaggctgttctcttaggtttggagggcaaccaataagggaaagttttttttaaaccataatttttataattttattgagataaaatttacaaaatatatcatcatcatttagaaaaagttatgcactttattacaaaacatgcttgcaaataaaaaaatatcacatatcaaaattaaccagacccagagtctatatgtctcgacagacttccatacagtaacagcagctctccagaacggaaactgtggagcttcacgttggatttttacactcttattattgaatacatttgtgtatactttttggttaaaaaattttaatgaataaatacgacttttaaaagcatgcatacttgtgtggtgccaagtgatatgtgcatacattgtgcaatgtctaaatcagagtcaagacaactttctcctggctgggaatatagacacgatggtacagtgcctcatatacattccagatttgattcctagaacaataataaataataataataacagaacaacatagtctttaaaagctttcaattacttatggtaaaaaatcatttaagaatatgatatacatacatgcacatatatgtatatgatatatgtgcatatgtatatattatacacactgaaataataccacgattttacaaaaaacagctaatggctggaaagctctgggttcagagaagagactttttgaaaaataaaaaatctttagaaacaagttagcacagttttgtaaaatactctctcttacatcggttgaaagccacgcagccactgcacataaacccttgcttgtgttaaggtcctgggtcagtatccctcaacctccacagctgaaaggaaaagagaagggctgtgaggagcctgaaggaccatgtcccttctgcctgaagtatctgtacatcccagggatgaggctctgacaggcagggtgttgttggttacagggtaggaattctatttggggttttgggggtttatcctgatgtatattctggctcaagtttcattcccaacaaattaaccagggaaatgacccttcaaaatgaggggacagtgactcacacatttcccaaacatcactcgactggcggtgagttagcggcgagtcactctgacttcttgtgataaagcaggctgccttcattcttagttgctgcacactgatccagggcctctgagatctgagttcccccattgaagagtccctaaagccagtgtttatcagggacttatatggctcttcatatggtgtaatttctgttgatgcagttataagtgatgttaaatgtttggggtcacctggggtttctccagacaccatgagccatttttaaaagtcaaggagagatgccttggcagataggaaagatggctctttcctagacaatttggggtgaggaggtgagccacgatggaggaacaccactgtcatttataactctgtccaccaactctggaatctatggtttggtccccctgccagcatccctgtaacaacatgaaagtcggcttttcttcccctggtcacccacggctccacttccttccaaacagatcttaggcgaggaagtaagtaagagactatgagaggattggtgtgaaataaataaggttgagtcttttttctaagttggaactcagcaaaacaaggcttgctggcaggggcggtagcatgtcagctaagtatagactggaggcaggtacatctgacaacctctgatatctttaaatgtcaaattcaccacacatcacagatggcatcgtgcctgggcatcgaaccccctttaaaatactcttcatgtaaatacattttttgtgaaaccacaagctgtgtctctcagttttgctttcagctggctttgataaagagattggttggcaccctacagctaattaagccccagctttccagctatcatcaatgaaagggctaggtgactctcagaagcatgctccactctccagggtccagggacattcacagtgcctttgacttggggtaacagatccacccttcagcttagccatactcttgagtttaccaccagagccaacctgtttgctatgcagatgcacggtgagaggcaccagcgagctgggtcaggggcaggctgcaggagtataatgtgcctttcctcataaattaatcttacatgtatttcaaactcctgcttgttatgtatttaatgtttcactgaaaatcaattttattttcttctctgtagaaaaacaaacaaacagtgcagtgctttgagaccctagcttctaggataagcatcctgactcgggggcttttctgacatttgtctagtctggctcctgtctctcagttgcagctatttatagacttttatttttaaaaatctcataaaaaaaagaaagaaagaaaaaagagagaaagaaagaaagaaagaacataatatctatacccaactctatatctgagccagtctaacctctaaacacacattgttttagcaaaattattatcatcattttataaatgataacttgacgtcaaacaaaagggtaaacgtaagggtaaaccacattttatttatacatatgtatgtctttaaaacaaaacaaagtttaaaaagttttggtgttaacaagttcaagttgtgtgtgtggaaaaaataacaagaagtcagctaggttacatgtcaaataattgtgctaaaacattaatttttgatacaggggagcttttacgtttatatatactttcccaaaaaatgggattttttttttttaagataaaatcttgaccatttattcaggaagagctcggggctgtgtaaccaccctgctcttaagaaattcccgggtcacaagcagagtggagtgtgaacttgagcttttctgttgtggtgaagcagggtgacaaggaccgaggttctgaagaaaagccttcaaacccatgtcatgctgtgcttttttttccagatgactaaaaccatcatcatttcccaagtctcacacggggcggtggggctgggtgtggttttacagagggcggtaggtgctcctggcaggcttcttctgagtttgagtgcccagttttgctaagtgaggacagggagagtattctaaagtcaaattctcaccagacactccccgaaaatgacaaacaccagtgacctcttttgtcttgaaattccctgtcacttgtaaactacagcattgttaagttcctctgtcttttgttcatcgatggtgtcttccacgaggcagactgcttgcttggtgggacgcagtctcgaaagggctgagagaactagagcaagaagcgtttctgaatttcaggcaggttgctaaacatcactcatgaatggaagatattaactcactggtgttcgcatccgttccacatcaccagaagcagtgtcgacctgtcactgggaatcttttagctcgatcacaaataaaaattccttctgctaagcattctgacaatctctttgtgcagccatcctcctgagttttttgctgtttggtttgggacctcctctgtttatttctgggtggctgtttgtgcagaaattgactttctaaagaaacaacgactccttggactctgtgggtgtttcctctctttgctactaaaagaaatttcaaatgtgaacaggttgtgcctaggcacaagggacaagaatccaccaattcctagattgtctgaggtcagggaagcactgtggtgtttctgtgggttttttttttttcaaagtgttcctcaatttaactatccagaacaacgagcagcgtctttgtctgaaatagatgtgtaaccctgaatttttctgaacacaaataacaaagattaatacttgcagaattgcctggagacccgagagtgatgtgcaggctgcagtgaacggttgtgtctctctgtagacaattgtttgggctttgaagaactcattaattcgattgtaagcgcctcagtgttatcaggaaagtagctgtagaaaatagtttcagaatgtgtcattttctccttggtttaatctgaggcagtgtgtgggcatgctggtattttaaagggctaaaaatgtacacattgctgtgccttcagacctgagggacggcgacaagcagggtttcctggactcacattctgctcgccttccaagccattcctgaatctttaggaaagggtcctctgctgtcggtgtcttgtagtgatacacagaacaacagcaacaacaaccacaacaaaaacaacgaggcagaaagaaaacccaggccagctttctttccatcgggtcctgatcttaatatttaacttcttatcatataaagccttgcgttttcattttatctaggtgccattctttatttgtttttaatgaaatgatttgtggtgtaaggctgccgtttggtttcaatattaatatattgcttgaactccgtgggcgtcgcttattttcagtagtaaataacagcttaactggtgatttttttttcattattatttttcttttacctcggtttaattcatttgactcccagggagtctcatctgcattttcaagctttatcttgtttctgtaattttttgtaaattaataatgatacagcatgtcattaaatgaggcagtcttagtgtctcagcgtggttagacaggagaatgtctccttgctggtttcaaaaatccaatcagcagattaatcattaatgattccccccccaccacacacacacaaaaggcttactagattgtttcagaatatgaatttactagagttctgttttaaaaaatatacaccagtgttctcatctatgcatctttaaccttaaaaggggttcgttgggtgcagatgaagtaccctttctgtttgcattgtggcttcttcattttctcattgactgtaattggtagcaaaaatgttgaaaacagtttgggaacaaaatgtctgcttacaccatgacaaaattggccacaatttgccgattgggttgataacaaaagcccgcaacacaaaataggtagaaaaacagtttgttcggtgatgtgagaccactggagagttccttttgcaggtttctctctctcttttttttattctgctgtttatgttgtgatggaaatacacgcagaggagtctctgcgctccctcccggcctcattaaccacttcactgtctggtttcttttcaaacttcagagaacaacctgttcacctggtatctgaaacaggttttggttaaaagcacctgaacttctgcatttcatccaggttcctgctctgaaaggtctccaagctcacggttttgatctttgaaaggagaatttaaattacacttccccccctaagtcttctatacagaattatattatggttgaattttcacttctgaaagtattaaacaaataattacagcttaaaaaaaagtttctacctgaccatacaatagacaaaaaataaataaataaacaagaaattaacaattaaaagtacaaacaaagccaaactgagaacaaacatgttttacacgaggcaatactttatcttcttcaaatgatagaaccgaggtaaacaggttctccccctaagctgttgttttgacttctcatgtctgtgtgtgtgagtgtgtgtgagtgtgtgagtgggtgtgagagtgtgtgagtgggtgtgagtgggtgtgagtgtgtgtatgtgtgtgtgagtgtatgtctacacatcgatgtgagggtcttctttttttccatctcgagagactcagacactccaggacaatagttaggatgaggcctctgctgatctgatctttgttttcacaaataaatacaaacaactcaaactgaaacccgatggctttgctgatagtacattagcagccgcggggaaattttcttcatttcaatgctctttcacaacccacattcagtttcggtaggaaaattattaaccttttcagcagctaaaagaggggtgtacaatagacaactgggtatgactttaagcctttggttctatttttaagattcgggtataccaaacccctttttctttctttcttcccgccttcctttgagtaattgctttcttccacagttacataattagtcgctgcgtttcaaccagttgctcatgttacactattgacttttattgctgggcggaggattcctaatgcccgctcttctactatttggtgtgacctggaggaaacttggacttgggtctgtttgtctcttctctattcctcccgtgtagggtataagcacacacctccttgatgtttttcaaaatccagtcaggccacatttcacagagggcacctggtttgctctcagaaggcagccccctccctccttcctgcctcaggtagcctcagggtggtgtctgtgatgctaaaggggccagattggcttgctcctctgcaggtctgcgtggcccagggggccgggctggcaggctttctccagacactgcagttgtgcaggggtgtatgcgcgggtggggataggggactttgtggtcagaatcttgcaagtcttgattcttcacctgaaacacacaaaaggtcagaacctggaacagagaggccggacttacaaggtctgttccccagcctagggtgctcacaccctagggaaggctatgtgtgaaaactgggttctactgttatctaaccagcctgtgtttcatgtactcccagtcatcttgttggctttgtgagtccccccaggccccaagtactcttgcctatgcccccaaatcttcaaaggtaaccatggaaactgagggaccaatatcttacctgcagcatgtacctacaatttcttagcttttttctttcttcctctctttctttctactttttctttcttccttccttcccttctttttcttctttgcctcgttctttattttcttatacttcctgtacaaggttaagctttgggttgttgttattgttgttcaacaattctcttcagtctacatttttggcctgtccttctgtgctccctacctgtctcagtatgagtactttgttctgcctggtacctatgctctgacacttcaaatgaccagactaagaggtgtgtgactttgtatctaccctccttcctagggtgacagtaatgtgtgtggagctgatggcatgactctgttcttattgaaatgaaatgccaagagacttcagggccccctattctcagtaggtctatgcagactggggagaggaggcagtgatgggtgtcttggctggttgaacagtttggtataggagatttgagatttgatcctgcatttgagaggcctccagctcaggtctgtgctgtgcagatacccaatatcaaaagcagaagatggaggctcttctctcaacagtctcctcaagccttggaagccttctgagttctccacttttcctgcccaccgtgaattatatggaagctttcaaccccctaaggcagagcctgagtccctcccagagctgctccaacacacccagcttctctccttgaccactgactgagtacagcatcccatctgtccagatccatgtgtatttttcacccgagcctggcatctgtcctctcagaaagatttctggaaaggcccatccactgggtggcttgagaatagttactgaaaccagacactaattgttgactaagtgtggccagtagggtcggtggagactacactagtgttcaagactgtcacttggagcaagccatcacttgccactgttggcccttgcgtttctatttctatttctgggtgctgtgaggacaacccaggttttacccttagagtttccaaatcagaagacacagggggaagcttgagggtttgcatatctagtgcatcctcaggtgatttcatgctgctgtagagagaatggtctggtccagacctgggtgcactgagaactgtgtccagggctagaggccactggcttgctttgaaggatcgtggctctaggttgttgttgtttgtcttgaaggctgaggtctttctcacatgttccaacccaaccttggaggtgactgctgcttttcaaagaccctttgaatttcttagtgaccatgggactgtctgtaactttgtcctctcacaaggccggtcagactatataaatctgtaaaagtgtccaggttttgttctttgaaaaaaattttaatgagcaaatctggagaaggaagtcgaagggaaggatgtggacagatgagaccagaagataacctgggagaccagatctttacctttgtggatcctttgcccatttttacctttggtgtactctgaggccgtccttagtggtacccaaggactactaaaaggtgagcccatttatgagatccttgaggctctggtattgaattttccatgagcatctggcatcagaatgtgatgaccaggatgctgggtgggaacctgggtatgactgtcaagctccacctctggattttgggttccctgtgcttttggctctgcctgcttggtaagagatggccttcacgcatccttctgagaggatggatgccggcttgggtgaaaaccacacatctggacactccggcagatgggatgctgtactcagtagtggatgagaggagctgggtgaggtagaacagctctgggagagactcagactctgccttagagcattgaaagtctttatacatagtcattttctgagccaggagcattctgtagaagctaagtcacatcacccaagccccgaaaggatctaaatatgcttagagatacgtggttgtagctctggacagaggaaccttggtgagagacaagctggggacattgagggctcatgcctcattctctgtatggatacctttcacctctagcctgaactacatttctgttccctaatgagtacttgtcttcagtatggtattcgtgggtcccagattgttcataatgtcttagggaaaataaagttgtgtatccgtagtggggatggggagttgctaatagtgaatattaaagacccacaagaagagcaaagctcaccaaagcagagagcagcttggccctacatgtgaccaggtgtcccttcaggctcaacccagtactggggaggaatgggtggtctccaccactttcagtgtccacttggttatggaagatgtccttgagaattgctgagaattgggaacaaacttcttatagtctccaaatagactagcctgggcttctccaatgaaagctaggtaggcatccaatatagggttcacaggaattagtttcatccatgcaaaagctcccaggccagcttattcaggttctgcagtggtaagctggacttaccactaactttggccactagtccatgggaactaggtgggaaagacccaagtcttagtccacttgtgccccgtctggtgtgaccttggaaagggtgtccacttcctccttctatggcctagcctgctgtgtctataaggccctatcccctctctgcgatttcagtacccacttggctgggagtgccatattgtaactgcttgagctattccatttgactcttgcatcccactaagaagaggcaggctggtgaggacagggcagtcggctatctatctctgcttcatgggtagaactagaggaagccagtttctccttccacccatgtcagccactggtgcgtcacccagttcctgtttctctttgcccacccaggaaggcgctgcagatgaaatcctgggccagatggcggatactgtgagcctggtcagaaaatgctggctcacaggacacaaaacgggaagctggttttcccaagagattcatgggtgggggtagggggtggggaggggatgctgttcccctgactgtgtaggtgtcacacagacaggttccccagcttccagaaacttccccactgccactgacaataggggccttttaaagaataacaaaggcactaaattaccacagttgctgctgtcaagagcccggaccctctaggaagctttgtttttcagagagggtccttagaagcagctcagctagagctcaatggctgggcaatttgccctccttcctaactccacgcagcaacaacactcatgtcgggaaacacacaatacacccgtctgagcaactttgcatatttcctctttcttgtatcctttgtatattatgcattgtgaagggatctcttggggacagatggagctattccaaaaatcatgcaattccccgctctgaggttgcagaaaaaatgtgggtcattaacaaaaggccgtggacagtgcaaagtcctttggagctcagggtgaactcaggctggtatcccactgggggcacagggagatgtcccaggaagttttgagtggtactgccttctcagctgtcagcagtgttgttcagcgtcagagctggaaacagtggccagcttagatttaaccttgttcccatgggagcattgtcttcaaccatctcatgggaaaactgctccagtgtgtgtgtgtgtgtgtgtgtgtgtgtgtgtgtgtgtgtgtgtgtgtgaggcagatttgagtgcagagcaggctctggatctacagcataccttttgagggcacggcaccatctgcctctctctacctgctctgcctttggaaatatcctttcacttgttttggagagctgaggatgtgatctgcagacaggggtgcaccaagggaggctgaccacaggggccttgagcagcagtgcagttatgaatagaactacagtctttctggaacttctgtcagccatatactgtccttgcaacctctgcttggttgtgtgtgtggaggggcttgtcttattattattttttctccttctctcctatagaggctacttggaacaaattcaagtaagcccacagttatctttagagtctcagataggagaggtgttgaggggctctgcaccttgtgaattggagttcccagtggacttgacttgaagttgctttgggtccttggaggcaggagctcaagacatcacctggggtgtcttctaagtcttgtgggagtctctagtaaaaatcaagaacacagaagtagaatctcatagcttactgggcatcagaccccatggggaagtcacaacagggtgaccccaaacaaaacagtggaattctgggaacgtttgccttcctgctctcccctgaatggcttttaaagggttgccacagctcatgaccacggttggatttcggatatcactatgagaatagttgtgttgctgatttgatcccctgctcatagtagcgtttttgatctgtctcccttctcggtttccatgtgctagagtgactgtcacagtgcggttggcagtgacctatgtttttcttgcatatttttgtttcagaataactgggagctgaaacaggaagccccatgacacagttgatcgaaaatgacacagacacagaaaaatcaggacgtgcccccagcagcacccctacctgctgcctgctgatcacggctgggaggcccgtccagggttcccacccgggaacggactcttagctactcagtgctcacgggtgctgggcctgcagagcttttcggatgctctcttacagctggtttgttatcttttaatcaatcaactaattaatctattactttatttattggccctccccatgtcttgatcctttcttcattaaaagcaaaaggaaagaaaatgcaattgtctgtttcttagctaatccagaaacaccgatttaaagggctctaaacttgaacatcaggcaactttctccaagtcacttgtcaagattatcataactgcacacagggcatctttaaaagtgtgtggagctggaatctcatcactcaaccatgtttatcctatgttttatacctttctagaagatctttcaagataatttctctagagtcactgttggcaggctgacagtggagaacactgagatctgtgtggacatgtcttctcagcacagctggtaactcacctagagatcactctcaactttaagcttcagttggaaaccccaactttctctctttcctcctgtctacccccacataaatcactgatttgtagatttgatctataatagtttctttggggtctactgtgtaccacgttctgttggcaaggtagcctccgcacccacctcctgggcatgtttggctcaagaagtgaagaacggggaggtcaagtgtatatcaagggcatttcattccgacgtcctgatttctcaaatccactcctcaattctgagatcctgggactggcacttgaatatcctctgaaatggttaaatggccagtcattctttcgacagagtcctctttcacatcccccaactgtgagctgaacaaatttaccatcctaggaatgtagccaaagagcccatttgtagtccccttcccagagtctattggttttcacttctgagcttagcagaaatccaagaataactcagtggccgtgtctactgctttatacgtctctacatcagtttgctaattggccatgggggtcgtcacagaggctctgggtgagtgaccagtggatattgtccagccctctcccaaatgttcagactctggaaggctctcctgaacaccaagtcccgaggcaccctcagccctgccagttatctctctgattttctacatggggattgaccagcatttgaagtgaccgtcgtcgttgtcgttgtttatttattgtctgtgggtctcactgtccccgcccctcagtttcctctttaagaggcaaacgtgctgtctcatcgccaagcctgtctacagaatctggcactctacagcagacatgctgcctaggtctgtcagatccttgcttctcagtaacaggcacatctgtattgtaaccacgcggtgaggataagcctccacttctgctagatgctggaacaggaggatgaggctctaggccatcctccagtctgctgctcagccagaggggtgggtcacaagccctcccccactgtcatatccacatgctcatcagacccaactttctccttgctaatcttgtcaagtccaagtttatttgactatattcctagaagatcaaaaaaaccattgagttgttgaagtaagtcttcggtggagtgtctcctggaggagctttcctcaaaagagcaccctgggactgtttttcctgtctgcctgggctcaaaccgagaggaagcaattggagaggtcacacagggagcagagatgatggtccagagcatgatgaatagcttagtgacagacataggtctgtgcgtgtgccctgcagaggctcacggaggtatctctgggcatcagcagcagtaagcatgtctctcccagatagctttccctgttctgtatagcagaacacagcctatacagctcatggcctcgcctctactctgtagggtgtttatggtaacagcagcaataaagagagtctcaggcttcaggaagacctgaagtacgcacacagcattgactagataattcactcataaggataatttttgaaaagtaaaagagaattggctatatagttttagtttttgccactgaggcaaaattttgaccctgaccagagagagcaattattcacaaattatatataaaaacaacaacaaccaaaaaattctcaacatccaggaactcatctggacccaacatcagaatttggaagtaggaaacatgtgaaataaacactggtattttaaattttttattgttttgtgtgcttaagtttttttttttcccttcgtgtatgtctgtgtaccacgtgtgtgcctggtgtccaatgagatcagagaggatgtgggaccagagttagacacagttgtgactcaccacgtgtgtgctgggaatcgaacctgggtcctctggcagagaaacaagtgttctagccactgagtcaactctctgcccttcacacacatttttaacatgtagccaagactaagcagcactggtccaggaccaccttctctgctaccgtatccttccttgtgtctccttgcaagctatttttaaaaagatagatgggttaaaacacgggcaagggccacactgttctcagggaggggcatgactcttggggacattctggctactggacgtttaatgcaatggagaatctgaggttttaattccttttgatttttagtttttttaacctaagtgtctcctgtaactgcagctgtcgtattaaacaatgcagaagaaaaagtatgtatatatgtatacacacacacaccatgaacaggcagcttcatcagaagtacaggagctagtctggcacatgggagcagtgagttctcttagctataagggaaattctggctgtcacataggtgtttgagctagctctctctgcctgttaactttgcaaaggactgccctcctgcctcaagcacctatctatattttgactgccctcctgcctcaagcacctatctatattttgagacaggtcttgggcagcagcaaaggaaacattccctacactagagaattgaaaataacctaaaatattttgcaaaaagtccaaggccagtggagaggagccttctgagcctacatgtgtatttattgtaatccaagaatttaagaaaatagagaggagagagatgggagtgccactacaaggacttatagcttttgaaataggctcaggtggggttgaaagaccatctaggttccattcctagacccccatatggtgactcataaccatcttcgttaattgggtccgacgcccccttctggtctctgtaggtactgcactcaccttatgtacataatatacacatgcagccaaacacacctatacaaagaaattttacttttttaaattttaaaacaacagactcagggagagagctgagccagctctaccaatgtggggtttgagatgaggagacagaaggcaaagctgaatcattttcttcttatcactgagactgtcagatttctttctttctatctttttttcaagttggagggaaagcaccttagacagaaaataatactattttgaatttcagagctttcccttttcgagcactgtatcatcttgggtttattttgctctcacactggggcccttggacccgcaagggaggaattgagaacgctgcttgcttctcaaacggacttccctgaaaggagttttaaggattagaaggtgaaggttaaggctttcacatcctgggccacacttatattcccagtgtcataactgagagaagatgtgcagaggtttttaaaagccctgcagtaggttgtgtaaccagcctccccggactgtgtcgtgtctcaccttgatcttctcacccttagcccttgaacctggggacgtttctttcttgtgtgacctgcaagtttaataaatatgacttctgtgtctccttgcaagctatttttaaaaaagatagatgggttaaaacacgggcaagagccacactgttctcagggagggggggcatgactcttggggacattctggggtccaacctcaggctaatgctctcactattcagccccccagtgggtagaagagcagtcattccagaccacacttgaccctggaaggaacactaaagaatctgaggtctcctgagtggcctggacaacaggtcacaggtgcaccaggtggtcatgaatcagtcttctctgggtgattgtgaatcctagactcactgtcattgagcccacctgggaccatacatagataggccaggaggagaggttttcaaatgctttactgaaagtaagacacactttctggggcattcccctaatcgcctgtgctggtgaagctcgtcaaaacaggaaatgaggttagcatggaatgactttctctcagagaacttgtgttgcctcccagagaccaccacgttcttcccaaaagctcgtggtccagtttaacaccttgccagggctttccttgaaatgggcgagtgtctggttttctgcaggctttcggaacgggttgctttgggaaacgcttgttcccagcctttggactccttcccctgactttcatattagcatctctgaagtgtttgcaggttggcgtgaagctcgatctgcatatatgccaaccacagcaagactccgtggttaagccaaggactctgcacacttccgagatgggaggcttcaccggtgccatgggctgtgggcagctccttccaaaccatggctctttgatcccatgctttcacaaagatgccaggaagagagagcaacccagggagtggaaacctccatgggaacaatgtcttctcctctgctccagaggggggcatttaaaggcagaaggaaccagcctggctcctttcaagtaaagcacaccgagtactttgatgaagctgtcaagagtgatgaagggctcacagacttggcaggatctctttggttatctttgctgaggtcttctggcaaagggctctagttgaactctctagaagcacacatctctttcctgagagtaaaggacatttgaggtcagtttgcctttatgtagttgagggaaagtgagctcttggctcacagtgactaagaccatagtctccaaatgccagacttgatttacctcttggtgtctacccaccacactctctggggttcacacttctgtaatcatgggcatgttttgttttgctctatagatatattcttgacttagcagaatctcaaaagccagcccgagttcaaggctgaaagaccattttctttcaggccagaggccctgtgcatatgtgtcagtttgggtgtctgagtcgaaggatttgtaaacagtcacctttctaataaccaacccaactatggagactccagttagttcttttctggtggcttccagcactatttcagagtctctgaaggccgcgtaattacctttatttaggttaaggaaactgagttttagcaagaatcagtttacctcctgtaacaggatagtgtacctcggtttaaactccaaagtatctgggctcacagtagctgtcaccatgcaaccaaccctccaaaaggcctgtgcatggtcaatgacatccaggcataactgaagggtcaatgacctgtgcagtcctaggctcgacttgtgcagccctctgcctgagtcaaattggtagaggtaccagtgttgaccactggcaccagaatcaaccacttccgtagtctcccaggggactttgagagcatggaggtcagactgagtcagttagcaaagggcagctcagttctgcagggctctaggctgagcagtggagcgggctgtcagacagagactcctgtgccccaggcaggcctcttctctcttggctagggtggggaaaactttgagaatcagtaacaacacagaggcaggatgggctgattaaactatgcaaagtcattgctggtgtttgaggagggaaagagaaagaaaagcaaattgtcaaaaaaaaaaaaaaatagtcgtggatctgcaacattcctccacaccaatcgctatcctgccattttggtcttctggacctctctagatgtccatggtccccagtttgctgaagataccctgttcatgccaattagaaaccaacattccttaattagtcacgcacagtcacgcatgctcagtaactcagagaggtcctggtctgggtaaggctgacctaggctggcacaggtttcctcaaaccttgtttctcattttatctacaggttactttacaaacagtagtcccttataccgctttgtctctttaagaaggaagtgggttacctggcagcttatctgcctcctgcagggctgcctcagcagaagcaaagccaactttgaggcatgagaatgagtgtgcacacctaagtatgtgtgttggtggggagatatgatcatatgagtatcgtgcatgtgtacatgagacataggatgtggtgcatatgatgatgtgaactgagtgtctgtggaatggatgtctatggtgcatgtgtgggtatgtggtacatgtctggggcatgtgtgtacctgggtgtatttgcacacccatgcctgtgttggtaggtgggtccatgggtggacatgtgtataggtgactgtgtgcctacatgtgtgacacgggtataatgtggatataggtatgtgatgttcgtatgtgtggtatctatacactgtgtctaagtgggtctggagtctgtggtacatggtgtctatagtagatatgtacatgcctggaggatgtgtgcattagctgtgtgcatgtgtgatggatgtatgcagtagctgtgtgctgtgtgacagtttgtgtgcagtagctgtgtgccagtgacaggtgtgtgcatgtgtgatggatgtgtgcatagctgtgtgcatatgatgggtgtgtgtatgtgtgatggacgtgtgcagtattggaaagattcggctgcattctaagtatgtgtgtggcattcttatctgattgacctcctccaaatcccatcttatctctgcttgtaaattattagcatcctggtccctgtttccaggccctggagcacacaagcaagagtctgccctgcaggaaaacacagccactgtgaggcctctggtcctctgcacctcacttggagataacgtctggagtgctctggctttgctagaaagcagttctgcacattgcaacaaccaggctcctcttgcagagtggatagataagtgttcactcattgtccttcctgtgtcctttcatggtgacctaggatatcaggcaatgcaaacgttgtatttggaaatctatggtccataaaatacttttgcactggcttgcaggaaatgagtttgtttaacaagacagctctaaatgttaagttagtttgaaacagatggatgggtatggatgattactgccaataccccaggcccaaggaaaccagagggcaaggtagccaacctgagagctccctcctgcctggctttggggatgtctgtaccaagggatgatgcagaagtacatgggctcccatactcattggctttgcatccaagagaagtagcagaaaagctctttgtgaaatatcctaaatgagcctcttccagaaaggacctcattctctggggttcaggggagccatttacctgtactgacagacatgtgaggctattgtgggaaaccttgaaaaaaaaggggatccctggtttttctgaagtcaccagcaattggtgctcacaactgtcaccacaagagacccaaaagcaaaacaagaggagtgggggcttttctaggaattccctgtgctcctcttggcgtggcaaggtgaccaaggttcctggttcacctttagacagtgtagaggcggcacattacagaactgcctgggccaagcgagggttgctgtcagagtcagctgactccgataaggaaatccctcacaggcaactcctagttgtagctgcgcgcctccccctccttccactgggcgtggaacaaggaagatcaaatgcactgcgcgctctgcacactggaaatcgggaacttgatcactgcgggctgatgatgtgttttgaaaaaagagcggaggagaggtgttctttccccaaaagttcccatccactgttgagtaaacaccataaatctacggcaggagacaggctgccagcactccgattacctcctgctacacttttagcttcaacttttaattccctgaacatgaacaaccttgtattccagcacaggtctgattaatgaggcaagttcaccatcgtagggccaaagagcagctgcccaccctcttccctcctttcccccctgtggctcagtaaccatttaaggaaccccattccccagcccccaaatatacaaggcaacgggctacaataaaatctataggctgtggcagataaactcctttgtctctaccagagctcgctgctgacagggagcaggacttctccagtttgccctggggaatctaaaatgtctcactgctagctccagcaggagtcttgtacaccttgcctagggagtcactgaaagtctgtgggatacagacaggaccatctgcttcccggactactgcatagttgaagctatggccaaagatcacatcctcaagatgatccaaatttacacccaggaaaaaaaaggagatcgtcttattaaaatatctgtactccaaatacactgatgagtgtcttgaataattttggcatgggggagagccgactgagtatttaacacgtgctagacaccctcctaagaactgtcatggtgctcctgtgaatagttttggggagctctggaaaggctccacataatgagttctgcatatctgacatcatttgctgacaacagcagccctgggtggttggtggcattagctccatgcttcccccgtgagtgagcagaggcttatgggaggacatggtgtgctatgtggctagtctctgttgtcatcttgactgcatctagaatcagctaaaacccaagccttgggcaactcttgtggaggatttttcttatcaattttttgaggcaggaatatttaccccagtgctggacttctggtgacagaccacgtaaaaggatgtggaagaaggaaactttgcgttttgcctacttagcctcactccttctggcaagaccatctatcctattgctacatttcatcaccaacattagaactaacttctttgggattctaatatagactgaagccagtgtctctccaggggtcctccaggacactacatgggagctatgagacagtgtgaaaaggccattgctggattagctgggctatatcctgtaagcagtctaagaaatcctatatatattctctactttgaagagccctggctaatacacttgtccggggatccagtttgagtctgagctctgctctggcttcaacttcaccctcagtaatccatagactcacctcggtaattgcatccactgcccactactaatcctcacacgtacacgtctacacacacgcaccctcgtccacacttgcttcagcattagattcattccctcaagagaacctggattgatccaaaatgtagagatctagaatataacttccccacgctgttaaggctttcacagaatcaaacttccaactgagttttgatttttcagcaaacttttgttcaaaatggctagctggaaattatcttagatgtgcaggcccttcagtgtcttagagcttctctgccagtgtagcatagcaacagccagaggtgatgcacagaggagagccattgtgttctaataaaatgttattacaaacaagacaaaaactctgggcagcctaggaatttggagcaatggacagtagtttgagactccatcattttcaactcaagacaccattaaaagtaatattaggacgctagcgttttagatatagggtcagtccaacctaccagaagtgaacgtggaggcagggtccttgcaggtaggcagtagaagtatggggacattgttgtcacagccaggtatcctgggccaggcagagcccaattaacattctacataaaagttccctggcctagcttaagaaaccagacaccaggcaactgagtgcatccctactgctgccagtgtgtgtgtgtgtgtgtgtgtgtgtgtgtgtgtgtgttgctaactatggtgaatctagggaagaccatccacatctccccagagggacagatgcatgaggcctgagcatattggcacaaggtcctttggacgaatcactatgaaccccaggctcatacgtctgctatgctatcttccttgttcctcggtcctggtcccgggaagagtacccatctgagtggggccctgtgctgtctacctacagatcacagtgatgtgagaacgtggtcccggtgtcttacgtcctggccttagttcctggtcctgcctctccctggcccaggcagcaaaggccaccacagtgagcagaccccataacagacaggggacagttcacagtacagccctgagtcactctaccaccaagacaatttttgcaacctctctgagccctagtttcccctttggtaaatggatgacaggattagcttttgcccggaggagatgtaaggaagaagagaagtaggacctagaaaaggccagcccccagagaagaggcctccacactgagctgccaggaaaggcttctgccatctgttcatgcctcagagccaatgctgctcagaggggagcctggccaggtatttaaaagggaccttgacttactttgtggtaatcaatctggccctctgtttgagagtctgagaaccacactcagtttcattcacaccctgcctgcccttcatgccagatgtggcccttgcctctccagtgttattcaaccctcacatgcagctttcaaaaacaccccaaactcatcaccatgtaggggtggggaaaactgaggcactcaatttaaacaatcccccagggcaaaggaaagtcctggtgctgggattagaacctgtggtgagcacctgagttgtccctcctaaccacaggtatctaggacacagcatgggctaggccttagctggacatggaggtgctctgagtccacactgggacaactgaggcaaggcccagctctctatgggacacacctgttcctttagcgccagctgccctgagcaggacatagtgaagtcactagctccactggactcttagctttccagagcccagggacattcaaaggtgtgggcaatgagagcctgggattgcactgtgcagaggacagcagaggaggagggtgtcaccaacagtgactagagatggacatggcttttgtcatcatctccatgcccttgaggtgggaaggatgagtcaggtaggaaggcaagtggtcccctaattcctgaaagggggctcctggctcctggttggagctccatttgcctgtatcctgggcctgggaacagggactctgggagtagagctgagcccccactgggaagtgagagcctggcttagttcctcatatgaggcacacccaaattcccaaggcctcaagttgctcaactgtgtcagggaaagcctgggccaccgctttccgaatagtggctgagtctaaactttggtgaccagagtctggcctgtctggcctcagagactgaggaacacactctccatgtcccatagtccacacagggaggagagagctgcgattctgatggccaagggacagctgttccccattcatctttgtcaagctctgacgcctttggggactaaacttgaaggacaattttgacggttgtaaccaagagagctgaaggaggtcaaggacaccctaccccaaccctacccctgcgttattctgggacttttttcttgctcaggagaagacattttggtaaacaagggctgtgaccaaatgtacctcccctccccctctcccacaccacactctgtcacccaggctggaaagaaatgagccagcaagaagtatttcatgtctagctaccatcttttgagacatacctgcttgggacacctatgaaccaagacccttggcccagttctaccgccacctccacctaaccatcatgaacatacacacacacacacacacacacacacacacacacactgtgatttaaatgccttaatggcctatggccctcaaagcaaagcccctcagggagcctttagcagttcctactctgagtgctgcctgtctggacttcttcctgggatataactctaggtgggtacctggcagccctgtttattcggacctttggcctggccctgttcccaacatgcactgcagctcgcatggtgggtcctccttttcgccttatagaataatcaattcccgccagctgggtgatttaggccgagagtgggcacagtaagcgagatgctgaatgactctcagagccacgggctccgaggtgcctggcccaggggactttcgggaggggttgcaggctccagtatttggaggctgtttcccagcaggaggaagtctggacacctcctgggatttccctgtggcttaaggaacccgcttggttcctctagcttttgctcttctcctgcagagtacccgtctttcccatgctgccttcaactcttgggagcttccagtagcaccgatgtttgctggtacagttcaggaggctgaaataactctcactagcaggagtcaaggtgccatgggtctggtaccagcagatagctttcgcctccctctgttttggtttctctaggctattagcactccttgtctgtggacccttcctctctctatattacagaatgactcttctgcccacccccatctcccctcctctggccttatgtctctgttttatgaggctctggatgataacaaagttgtactcggggaccagaggctgcaggtgttttgagagtgagtctcctgccgctcccacctgtgtgctgaggttgcaggtgagcactgtggggcccaggtgagagtgtgttttagttacatttatatcgctgtgacaaaacaacatgacctgggctattattagaaggagggggttacttgggatcacaggtccagagggataaagtcccctgctgctatgatgaggaagtgcggcagcaagcaggcatgacagctcagacagcttagtgtcttaaaccacaagcagggggctggagagatggctcagcagttaagagcactgactgttcttccagaggtcctgagttcaattcccagcaacaacatggtggctcacaaccatctgtaatgagatctgatgccctcttctggtgtgtctaaagacagctacagtgtgcttatatataattaataaagtaatctttaaaaaaaaacccacaagcaggaagtagagcaaactgggaatgatgcattgctcagaaagctcaaagcccactacccaaatgacatatttcccctgtaagatcacacccccatgagcctccatgagcctccccaaacagtcccaaatgccagagactatgggaagcattcgtcagtaatacctccacagaatggttgaaatctagtaagatatggggtgtgggcagctagctgggtaagtgtgtgtgtttctgtatatgtatgtgtgtgtctgtatctgtgtctctgtatatgtttctgtatgtgtgcatgtctctgtgtgtatgtctgtgtgtatgtctgtattgtgtgtatgtgtttctgtgttcctctatgtgtgtgtgcctgtatatatgtatatgtatctctatgtatctctgtgtgtttgtatgtatgatgtatgtatgtatgtgtgtctgtgtatgtctctgtatgtgtgtgtctgtatatgtatgtgtgtttgtctgtgtgtgtatgtctctgtgtgtgtgtctatgagtgtctgtgtgtgtatatatgtatgtgtatttttgtgtgtctctatgtgtgtgtgtctgtatgtgtttgtatatgtattttgtatgtctgtgtgtgtgtctgggcagggatcggggagggcataccaacaataacacaacccaggagaactggctggatcagaaagggtattaaccactatatccgaggtcctccaaagactgcttgagagttgggggtttgacaatgacccaaggtctctagtcagcagatcttggtcctcagccaggtgggcaatcatctgggtttgctcgggactgaggatctcctgggaagggcttttggcactaaagccaggtcagtcttgggggggcctggagagcaggtatcctatctcccccacccccaactctgtggctgagaaaggatctaacccccttttgtcttcagccttgatcactggacagatgcccactctggttactcttgtgtgtgtgtggggggggggggggtaggggttgctctcaacatctctcttggaatagaagccagaatttttccaggattttggactgggaagtggaaagtgagcacttaaaaacctttagggtttcatgagaagaatcagattttattttaacagtaaattataatatttgacaaaatgcagacacattgcttctcagagctggtactgagtcagcgtggaaagtattctttctctagagcagcggttttgtcctcggccttcctggtgctaagaccctttaatacagttgcttgtgctgtgacaccagctgtaaaattagtgcattgctatgtcacaactgctgctgttatgaatcataatgtaaataactgatatgcaggatatctgatatatgaccccaaagaggtcacaaccctcatattgagaacctctgagctagaggagtaagtgtgaattacagaaagactttacttgagtggtgatggctcagggaagacttcagcagcgtgtctcgtcactagggacacacctaggtgtagaagaatcctgaccatctggatggagaccccttggggtctctgtcaagcctctggactctcctttgtgatggttaaccttgttaattaaacaggatataaaaccaccatggaaacgcatttctgtgtgtgcctgtaagagtaatcccagtcagaatgaatgggaaaggaggggtctccctaaatgtgggtggcatcctctcatgggctatggtcctggagtgaagaagatgggagctgagtacaatgttcatctccctttgttttctgacttgaggcaggagaatccacggtctcactcttccacaaactaccttccccataggatgctctgcaccctgaactgtgagccaaatacaaaactttcctttcttcacaacaatgtgaaacgaaaaaggagaggttgttcctctcatggcccatcagagtgtataaaacactcaggaataggttaaggaatagtcataagtaccatatatcgatctcctagttggtaataataaaatatttcgttttgccgataaagcatggataccctgacagtctgccagttttagttgcttcatgaccttgtcaacatttttcattcacggtgtttagcatagcggccatttagtacatgggaaatgggatctcattgtggttttaattagaatttccctaattacttggggattaattagggaagtaattctctaatttccctaatcatgttgtctacctgtgcaggcttattggccattggtaaagtatctgttctaccttgtattggtttgttgttattgctgttgttgttgttgttgttgttgttgttattcagacatccagcaagaagcagctcaagggtttatcttggctcacagtttgaaggtccgactcatcatggcaggacttggcgttgggtcagatgccctgtggctgtgtcatgtggaatgcgaggctgcctgctcatatctcagcagatccagaggggacaaagaagaaggccacacccacacgacttcaggcaaggatgctgctgctcacattcagggtggattttttttttttgttctgcccttgttaagaatttataagagatctttatacatgcctaaaataaataaatccattactgaccagacagattctgagtattttcaccgtctatgccttttttcgtttttgctgcatataaacaatttatcagttgcattctgtcatcagtgtttttcttgttctaagaagtttctgcctacaccaagatggccaagattttccaagtcttctgcgtgtgtagcgataattttggaatcttggcttctttaaaaagcacaaatattataaaaatatgctttcagtttaatcccaggtgtagggatgtggggctatttcagactgtctgcagcagctgactatgatttgcctcatgctctagtagagatgtggttttgccagctgcagatagtctctgtgattgtggtatgtttggaattctgggaacctttcagaaaatacctaaatgctaggacccgagagatgaggtcagttgttgctggtcatttaggaagattggttgcagtgtctagtagccatggtcaaagaagaaacaaaagaaaagaaattagattcatgaattttcctatttcctgtatccccactatccttgtttttctctcctatctagtttttttttgggggggggggtaaaaccaggggtagggtgacataaagggtgggaaaaagaagaacccacaaagtagcaaagaccagctatatttgtattttataatttgggacttttacttttaaagatgtattgcttaattttcatttgaagatttaaaatgatgttgctattctggaacttccacttgattctttaaaaaaatgtattgctaagacaatgggaagtagagaggataatggaacacatgtgttaagaaagcagataggagattgtgtatggaaaggagaggaaccagctggaggtgggaaggtgctggagcaaacagtgggggaggggggcaatgagagcagagtttaatgcttatgttatgagtgaagatgacacaatgaaacccattgttttgtctgataaccttaaaataaaaaatatatagtatatatgtgtataaatattatataaatggatatgaatgaatgtatatattgtatatatgcatatatactacatacatatacattcatatatatccattgttgtctccaattctccatctgatcactcattatagctatgttttcacttatgtcctttaaacatgcaattgttaagtttttatggtgctgagcaattagctcagtgctagagtagtttagcatgtgccagaccctggacttaaacctaagcaccaagggaaaacaaaagctcttaactagttattacaacataggatatactttgacttttgtgtcattgtgttctccccttaaatacaaatcactttaaaacctttttctcacccatttaaaatttcttcttgatgctgttcctcgtgctgatggtggcagagattctggatcctgtttttctttgacatcattgggtggttacttgtggatatcatcttgaagatgtagaagtctggctttgcagtctttaatgtagccttgctcaacatttctccttaaactgagagaaaaaattaatccctggaacatggtctcttggtcctcagtataacatgcctaggattttatgacttgcccagggcatttcaaaggttcttttggaaaagttggcaggattcaaactctaaattctgtctcctaattggtgggtgagagatgaatatcaactcacatttaaaacatttaagcacttctagcaccctgcccccgcccccatttctgatcaccatggatgtccatgttctgtcccctgtcacctcatggcaattttctgccaacagcctggaggggctctgggaagacagtataggcctggtcttactcaatgaagttcctccttccaaaagccaatcccaacttccagatatatattttctttttctcacattttgttcagagtttataacctcctgtagaggatttgacactagcaactgtccaaccccaccagcaccagaactacctacctcttctgaacccactgtaaggttttgaacaatattttttcaaaatcagcctccacaaaaaaattattttgaataacatcctctgtaatagcagcctagggttctttaaagcctttgctgttagtagctggaatttctcaggacaatgttgtaggaagccagaaacagagactaccaggcctgccacttcccagttgtttaaaggcacctgggcactcaaaagctgtataaaggcaatttgtggtggaagggtggtcttcagaagttttagtactttgtacaaatatacaatacagttcccatagcataagccttggataccattacttaggattggtcttgtggtttttttgtttgtttgtttgttttgtttttttttcatgaagatgctgatgttctcctgttcatcaggagccctccttgaaagttaagttcatttttgatcaacccaaacttgcaaacttcattcttgctgataagtgagggtattggtgttaggatactgaggtcttcccaagacagtcactctgatgagtgctttgtggggtcctggacactgtggacagcaaatgagaaaaatctctagatactaaggcttcttccttgcctctgtccttgaactgtcagaagccccaggagacgaaagagctgctcagagtcacagtgagtcacttgtgctgtgaatgcagagaacaaaacatacagcagtctgtgttctacactcagctgcaccttctgtcagggacggagtgattctgaagttcaccgtgtctcagggaggaaagaaaatagtgatgtggggctggagagacaacttggcagttaagagcaatgactgctgctcttccaggggacttgggtttggttccaacatctacatgtgctggcccacaaccacctgtaaccccagttccaataagatccaatggcttcttccgactctctctctctctctctcatcatgcacacatacagagggatcagggaggagggagagaaagagcttttttaaaaaatcagtctacttcaaatgctctttcattggctgagatgtttttgttttgttttgtcttgttttgtgtttctgtgataaaatatcctggccaaaatcaatttaggggaggaaggtgtttctttggctttgtaattccatgtcgttgttgatggagggtctaggtggaaggaatcaagacagctagtcacatctcaccgaagaacaaagagacatgaaggtgcacattgggcctttctgctggctgctgtgcccagtgttcttcccagcaggtaaaagcatgctgcccacattcagggagggcttcccacctcatttcacaaccaagacaattccccactcacatccacaggccaacctgatctaacaatcccttaaggactctcttcccagggaagcctaaaatgtgtccagttgacaactgaaatgaatcgtcatacttgttcattcaggtctgaggatgtggattatattttctctgccatttgagctcttcaaataaagtgatttgcagatccaaatgctttttaccagtagactagaggtagaaactatgcagactctgaagccagctcatctggatttcatcatcaggtctgcccttgtccataagaattgctacagcttcagcttccacactgactgagtctgcttcagtcccaactccaacacacacacaagctgtgtaacctgcagtaccttgcttaagctctgggatccatcttcctcatctgttaaatacaagtgttagggccttagctgttgtatataaaattcttagccagtttttcctgcatgtgaagacacaaagaggacaccacgaacatgtaaaccattgttgctgacaatgaaagaatatctacgtggacatttttgtcaaatgaaagacaatgcagggacccaaaccagtctggtaaatatttgtgctccaacatgcccacctagacattcatgggtgtgaccccagcaagataagtgaaggtgtgtgctagccaaggctgtgttggtcagaggtagtggatgtaggcatttctttggaaatagaaatgtacaatgagcgccgggcatggtggcacatgcctttgatcccagcacttgggaggcagaggcaggcggatctctgagttcaaggccagcctgggctacacagagaaaccctgtctcaaaaaaccaaaaaaaaaaaaaaaaaaagtgcaatgaatcaagcaaaattatagtaacaaaaggcatcaatgtggaaggcgaagaccagctcctgaggctgtcccctgacttataaggaccagcacctgaggctgtcccctgacttataaggaccagcacctgaggctgtcccctgatctgcaaggaccagcacttgaggttgtctcctgaccagcaaggaccagcacctgaggttgtcccctgacctccatagatacactatagtatggtcgtgctcacagtcacaggtatgaatccacacacatggagaaaataaaatgacagaaaggtggtcactgggggccacagtgcctactctcaacactgccagtaaagctgtgacgaggactttgcctgttagtgtccctgtctccagaaacgtggattcaggcgtgaccgctatagttcagatcagcaaaagagtgcccaccagagccaggaactgtcaccgtggtgttgaacttggaaaggaggatggaaatgttcactcatccgtgagctttgcgtgcagttcctgtaggctggaggctcaagcttctcgctactcacttctgtttggttgtaaaactctgagcgcctcacccctgtttctgacctctccacagccatcttccaacctcggtttctcctcagagctgtggaaggattctggtggcaggatcacgttccgtctgtgcagtgtgctcacggtctgtgtgggtggtggctcgcccctcaccgtgcccggattcctaatatccaaatgctttctccccttctctttttttacagtctatagttttccaaaggctgggaaataaaaatgtctgactgataaatgagtctagttaggtggaaggatgacgcgggtccattttaattcctcatttgcttttctctgcttccaaaattcatgcaataaacatccatcatgtttgtgatcagaaggaacgagcccaataaaaagccaacccagaccccaaggttgagcgttctgattggctgagggcctaagctccaagaaagagttgaaagttctctcccctctgattgctgcacactacactccaggtgatgatactgcagagtccccttttcccagagctgcagacctgtagggacccaaagtagccaagactctcttaccctggggacctacttccagcttctaacactttaagcaacagttcttctccagatcggggctcctaccagctgacacccacacatgcagccttgcacagtcaagaccctccattgtgtcccataggtccccaactatctgtctttatcttcagacaggaatgccgagtctcttctcacacatggcagccaggatcatctctctgggacacattttctgggtggcagtgtttgctccttggtagttcaagtctctctgtctactctgggtctcccagtctgttagttcagcctccactgagctgcctttatttctttttaattatacatctgctatcttttaaaatggaagtttcctattggatttctatgacaatatagagacatggatcaactccaacaaaaatgaaatcgttaatggactagttatttctctcctgggcttccctgacagaagaacccctgtggatatatgcatgttggttggaattccccttcagtatgttgaggggtggcgccccttcagtcttggcagggactcagcagctgagtggcagacattggtgaatggtgtgaggattcagctgggggaaccaagagtggaggagtggaaggatggcaggaagcatgtgagcttagaaatcctgccccagagtaagctgggctatcaccggctcttagtcctgcacaatctagaaacatggctttgcatgtatggggaagacaggcccagcttggacacctgctgcccagcctggcactagatgtgacttacctttctcattattattagaagaaggaagagaagggaagaggggtttatcctggtgtccaatttaagaaaggctccaagtacttcttgccagggaaggctccgtgataggggtgtagggcagctagccgcagttggtcagcactcaggcacagagtgcttgtgtgttgctagggctcagctcacttttcctttgtagtctttccaggactccagcccagggattggagccacccacatttaggaagacttttctcagctcgtctcagtcaagacaaatcccttcttgttgttcttagagtcatttaatttttatgtgtatgaatattttgtttgtctgtgcaccctgtgcatgcttggtgcccactgagctcagaagagagcattggttcccctgattgtaagctaccagaaggatgctgggaattgaacccaggtcctctgtaagaacaaaagtgctcttaaccactgagccatctctccagcccacaactaacttgatctagaaaatccccaacaaacatgccaaggggcttgcttctatggtaatgctaaaccccaccaagtttccagtgaagatcagccatcttacacggagaaactattgtctggggtctacacccatcctggctgcatgggatttcaagatgccagcatgctccctggggccagttgctcataacatgggccatttgttatggcttctagtaatggttccatgtcaagtggccatcacaagttatagccttcttgtttgcagagttccaaagtggtgcagaggaacacatagtaagagatatggagtgaacgcatgcgcacatgtgtgtgtatgtgtgtgggtgtgtgtgggtgtgttttctggtctctgtcatgaagccaaccaggattcaatgacacctactctggtgacctttcctcgtcctaaaggccttgcctgtaaacatggcagttacatggcacctccaccttcctcagcccgcacaatggtgatcagagcccaacatgactttcagaagtgttattccctcgcacacataacatttttaaatacacttgaaaataattgctttctttaagagtgtgcattctaaaactatgacttccatattcctaacagtgaagtgactggatagtgggggggcgggggggacagtcaggtttttaacagaatgagaattacagacaaggaaaagactgcgattgttctcatggtaatcccttagtgttagagagaccagtgtggaatcaactttagcttactacagctacagatggttacgcacaaaatattcagataactcatgtaggcacatatattttcctattctgccatctaaggtgggggtgaaaaatcttatcacaacaacaaaaagcacacctctattccagattttttgtttgtttgttttagttttcattgtatgtgtaggggcaatttgcctacatgtacttctgtacaccacatgcatgcagtgctctcagagtccaggagagggcgtcagatctccaggaactggagttacagctggccataaattgcaatgtgggtgctaggaattgaatctgaacatttctttaagtgcttcttgaccattcgagattcctctgttgagaattctctgtttagctctgtaccccattttaaaaattgggttatttggtttgttgttgtctaatttcttgagttctttatatattttggatattagtcctctgtcagatgcagcattggtgaagatcttttctattctgtatgctgcagttttgtcctgctgctgatgtccttagccttgcaaaaggcttttcagtttcatgaggtctcatttattaattgttgatcttagagcctgagcaactggtgttctgtaattggatttgtctcctgtgcccatgtgtccaaggctttccccactttcttgactattagatttagtgcatctggttttatggtgaggtctttgatccacttggattggagttttgtgcagggtgatagatgtgtatctatttgcattgttttctacatgcagacatccagttagaccagcaccatttgttaaagatgttttcatttttccattgtatgggttttggcttctgtgtcaaatatcaagtgtccatagatgtgtgggtttatttctctgtcttcaatttgattccattgatcaactaatctatttctacactattaccctgagtatttatcactattgctctgtagtacagcctgagatcagggatggctatacctccagaagttcttttattgtacaggaatttttttagctatcctgggttttttgtttttccataggaagttgagaattgctttttcaaggtctgtaaagaatggtgttggaatgttgatgggaattgcattgaatgtgtagattgattttggtaagatggccatttttactatgttaatcctgccaatccatgagcaggggagatatttccatcttctgatatcttcctcaatttctttctttggaaaattgaagttcttgtcatatagatctttcacttggtttgttagagtcacaccaagacattttatattatttgtggttattgtagagagtgttgtttcctcaatttctttctcagcccatatatcatgtgtgtaaaggagagctactgattttttttttagttgattttgtatccagccactttgctaaaggtgctcatcagctgtaggagttctctgatagaattacagacaggaacctagcataactgtctcccaagaggcttcagccagaagtgaagggggaaagtgcagagatccataggcaaacatcaggcagagtttgggtggtcttacagacaaatagggggtagaattgagggagctgggggctcaaggacaccacaagaagacctacagagacttgaagacctatgagataactaaatgtagatttggtatcaagtattcaggtgaaatactgtggaaatttgataaactgtagagttcagttgatttatgttgtaattaatggtgacatgtagacctcgtcaacctgggcccataggggctcacaaagactgaaccaccaaccaaagagcatgctggagcttgacctagcccaccccccatttgtagcagatgtgaacttgatctttatgtggaccccctaacaattggagttgtctcttactctgtcacatgccattggacccccttcccctacatggactgcctggttggacctcagtggaagaggagatgtttagtcctgcggggactagatgtcccagggtagggtggtactcaactgggctgaggggagggatttgtaagggcaagactgagagaacaaattgaggaaaatagaaaagtgcaacagaatttcaaatagtgtgcagacagtccaccctcataggtggaatacagctccccactcttcaagtgtggctgggcttgatgacttccttccaaagagtgggaggcatctcacagtggagaggtaccacaaacaccatcctagtcagatggtcaagcgagatgtcacgataacaggtattcgtgtgtgtgtgtgtgtgtgtgtgtgtgtgaagatgtcacctctcttctgaggttttatcactcaactgtgataataagcaaaataacaacaacaacaaacccaaaccaacagaaattccacctaacagttctcaaaatggccacaagctgcaaaaacataagtttgagaaattgtcatggccaagaggaatcggtcagatatgataactaaatgtagctgcaataccaagtattcaggtgaaatactgtggagatttgataaactgtagagttcggttggtttacgttatgattcacggtgacaagtagacctagtcaagggaccgagtgtgaggtataggaagactccctgcactaattgtcaacttttctggaaaatgaaaactttggaaataagaagtttagttttaaaaaaggaggtaaataaaggtacccccctccgatctttctcctgttctgtgtctttcttccctcctctcttcgccctctactcctttatttcggaaagagcatcatacaaatgcccaggaccttgtcactttccagctgtcttcctctgcatttctctgaagcctggtaatatatcgccttccatttcacaaacagttagacatccccatcacctgtcgaccttgacacctgcaaagatccctagtagaaactgcccaataggctagcttgagctcatttgcaccatccccactgttcagcatggccttgtgagcagtcagggtcttggccactcagcttagggagctcaggacactcccaagggaaatgtccgtttttcagggagaacctttgcagggagattgcagtccatgcctgctatctgctctctggcccacaggcgcgtctccaagcatgtaccacagcacccgagtgtgggcagaagccctcgtgctgagtgggatgaagctttgaagaggctgagacctatgagaaccgaagaacctttgaatctcccttcagctcccctaccccgaccacagccctcctcttgatgtaaaacatgtgttgaacttgagaacaaggaggctggcgtctgtgccaggaagactgcgctgctttaagcttcttcgggggttggaaacagatctacctctgaggtttgcatagcactctccgtggaagtcactatggctggttgagatgtggatttgtgagacagcacctgaagcagtgtgcattcctgtcactcgacctgttgtgttggggaggaacgcccagcttaccaccaggattatctctggaggctgaaggcagatgcctggactctcttgagagcatgtaaatgttaaactgaaatgttcagaaaccaagagaaggagccttccagaacaactgtgtacccggaatatacactctgtatagctgacgtattcatctacaggatagaccagaaaatctgtcttctaggcttccttctgcctcttcaccagctctgagagcctgaagagtcatggggcctcttatcaaagaaatgttgaaaaatgactaagaccaccgcctttaatcccagcatttaggagacagaggcaagcagctctctgagttccagaacagccagaaatgcacagagaaattctgcctcaaaaaagccaaacaaacaaaaaacaaaacaaaagaaaaagaaaatatggaccaaatacattaaaaactaatctcccagctccaaatgatacaggagagaccatgtatcaagggactaagagggcaagttaataggacaggacccctgatgtcctcctctggcctctacccacgtgtgtcagtgcatgcacaatcacacatatatgtgcatatagcacaatacacattacagcttctctctctctctctctccctctctctctctctctctctcacacacacacacacacacacacacacactcacacccacagtctgtgagtgctttgtctcgtaaacaggagactaggtgtccagattgggactaagttaagagatagtaacatctgtagatgggctgaccaagtggttaaaatggagatgacaagaggacaagagaacctgaacataagaggttcaggtgacattgcccctcagcaaatacttctcaagtgtctcctgcatgccagtcactaaccacagaggagaaggagggacagaaggccagtcactaccacagaggaaaaggatggccagaagcataatttatattctttctttctctctctgaatatataatatatatgtacacatattagccatgactgtgttcgataccattatgacatcatcacaagctgtgtttctatgtttacctttcatcatctttctcatccttcatctatccctgcccccctaacagctcctccccagatattttccccctttcatgtctcatgttcccttttgccccaggctccctgtctcactgaaggtttgtattactgtaataaaacaccacaaccaaaaacaacttggggaggaaagggtttattttggtttacagctctcaggctcttcatagggaagtcagggcaggaactcaaggcaggaacctggaggcaggggctgaggcagatgccacagaggagtgctgcttactgccttgctcagtttgttttcttttaaaacccaggacctcctccccagggttggcaccactcacagggtgctagatctctcacattgatcatccatcaagaaaatgccccacaggtttgctggcacactgacctgatggaggcattttcccagataaggcctctcctctcagatcactttagcttgtgtaaaattgatttaaaaaaaaaaaaaaagacagatccagcatcccctattgtactggctagtttgtgtcaacttgacacagctggagttatcacagagcaaggagcttcagttgaggaaatgcctccatgagatccagctgtaaggcattttctcaattagtgatcaagggggaaaggccccttgtgggtgggaccatctctgggctggtagtcttgggttctataagagagcaggctgagcaagccaggggaagcaagccaggggaagcaagccagtaaggaacatccctccatggcttctgcttcagttcctgatttctgacctgcttgagttccagtcctgacatcctttggtgatgaacagcaatgtggaaaatgtaagctgaataaaccctttcctccccaacttgcttcttggtcatgatgcttgtgcaggaatagaaaccctgactaagacacctatccttccctatcagctaatactaccctctcttggcctcctagacttttacattatgcacatttatacctgtttacatacatacaagtatgcagtgtagactaggatccacatacaagagagaacatgtggtttttgtctttctgactttaggtcaccttacttggtgttatacttttaagatccatccattttcctgtagatttaattttttcttcactgctgaaagtatcctactgtgtataataagtgccacatttaaagggtccattcacccactgatggatatctaggctgggtccatccccttgctgctgtgaatatagcagcaataaacaaggatgggcaagtgtttccttggaagaaaaaaatatttcctaaattgatatattaagtaatgcttagtgaggaaaaataactctggagtgtgtaaataataaagacttaggggtgaagataaggaaaaaagagaaggtgtttaggaggaggctacagaacaagaggcagattggggtacagcaaaagaagaaagactggcattccacgtcaggtatatgagcaccatctcattgatggtccaacggagtgaagtcccaggacctcctgtgtgcagctcctctcaccggatctggaaatgcggcagagttctaaggcagatgacatattgtaaagatttcccagagccaagaggatggtgtgtgtcatggggctttgaagaacagtcgtggagtccctcgctaccctggaaagttgaggtccaagcaacactgcacgggctgctgctgtgggtgcgtgtggaggcattcccaccaagtgggagggccctcccattatgagtgtgaatattgtcagggttttctctgtcccctgcccccatgagtctgcctatggctgcatcctgtagtttcattcctgcctaggagagcttctccttcaagcagactgtggcttctcctgtagtcatgcgaagaagttatcaggtttctctagaaaagccactaggataaaggggaagttatcaagaggccaggtcttcagtcgctgaggacaaaggtattcctctccaccataattcacgtgggagcccatcgctgcccgaaagaggaagtgcgggttgctctcacttctgagcctcttcggaggaattctgttgagaaacagagacaaaacataaaagcgaaagaccacactttctctccttctctcccgaaggagcagagagacccttcatagcagcacaggctcactcctccttcaggcaacagagaaaaatctcttcagagcgttgacagggcctggatgctggctttggaggagcacttaccccaggctgagcactttccagcctggcctcttagcatgcgatgtacagaggcttgacatgaagagaaccacacaccaggactcacaggacgaaatccaagactggcacggaccagccttctgtgggagtgaatgtgaatttgctcgtactgctaatgcttgctggcaactgttagctttcttggctcacagcagcaccatcggatcgatgtgtatcttcactgttatacaaatgcacccctctatatgccttggtgtccacatttccccttcgaataagaactgtactgaattttggattccagcccactctagtgacctcatctcaactaattatatgcatagcatcccgattcatcctgggaaaggtatgttctgagatactagaggttagacgtgaatggatgggtctggtagatgtcctagttttcatcaacgtgacacaaacctagacatttctggaaagaagggaaatcaatagagagactgcctccattaacagattggcttgtggagtgtgtctgtggagaactttcttgattgatcatggatgccacagagggcccagcctattgtgggtgatacgatgactaagccagtggtcctgggctattcaagtagcattccctgagtgtgcttgcacacacacacagacacacacacacacacagacacacacacacacagagtcctctcagttttctctctaggttcctgccttggcttcccttaatgatggactataaactataagccaaacaaactctttcctgtccaaactgttttatcagggcagtggaaggcaaagcagaatactggggaacacacttcccacagtgactttttctttccacttaggtttgaggagctacagacccacaggtgaaagggatgacttgcatggggtctctccttgactcggccttgggtcgctctgagccagaggctggctgggctcccatcacggcagagcccactgagaactaaggacactaggtgcccactccactactgagctccagctgagaggagtctttactgggtttttaatttaaaatgttttatgtgtgtgcatatcttgcctgcatgtatgtctgggtaccacatgcatctctggtgcctgcagaggccagaaaatgccattggctcctctggaactggaattcccaaagtcatgaggagccacgtggatgctgggaattgaacctgggtcttctggatcatccagtgttcttgactgctaagtccttcctctagcccctagggcaacgctcttaaggagagtaggtgacaccagatgatgaaggctggtgactgtcacgtacacccaggtctgaggatcctggaccacccagcctggcctggcatatgtctgttcagatggtaggccatattctctgaggcaaagagaaaccttgctaggcatcttccttcttcactgtacaatgaggtctgtgttctccctgcccagcccacctagagtcaggagaaactcaaatagtataggataggatagctttgtaaagaccctactccgcagcagtatggggggggtgattcttaggtcattgtgagactttccccggggagcactggcgggactctctcctctctcctctctgtctgctcaagggacagggtctaatctctcctgtttaacacatacctgaccatctcatagctggctttacatgcaggggccacttagcctgcccagctgctcaaaggagaagccaaaatccacctagagtttcgatccagcagtcctgtttggctccagttggaagacttggagaatccggcttctgggactgggttcgagccaggtgacccagcccgagggagccggagagggttccaggcacacacctgccactcgggtttccaccccgcagcgtctctttcctggcttgtgcttttcaagtgcctccgtcctgcaagattgacagctcacttttgattggaatcagagtgtaggaagcggtcttttcaaatttcctgtgcaacccagcctgccaaaagtcctgccactggctgttttatttaccctggccaccaggcctcttgctcgctgcaccctaagaaaacagattgctgtcgggagaaaagtccatgcgtgtttcctttctggaggctgatcaagttctgaaagaagggtttcctgcagtccattacaccattttggtttgttttatcccgtctccacctgcagagcagggaattagcctgcagcccagggctgggccagcagatgactacagggaaaggagagctcgtgggcgtggagctttccacaacacaccgtggccttgttctctttagctaggcattgtgtgctgaggcccaagcccaaatctgaataggattctgtgtaacttgatctgttttctttctttcctgtattcctgtgagccaaatttaacttcactccaatctgtggcctgtacatataatgttctgccggagggtgggggtgggctgggagatgtgggagagggtgtatatgcttgcggttttttttttcctatcttcccctttctacattttttttttcttttgcttgcctgcgttgctcacccactgctcacccttggccgggtataacttaatatggctgtcttgtctgcagccattaaccctttagggaaagtgagtgggtttttttttttttttcagtctctccttagcaaaccacaaagtttcccaacccccactcccagcgccccgttgagaagccttggcattgcttgagttaacagttggcctccaggaaacatgaacttccctagaagtgcttgtgcagcaattaataggccttcactcagatatgtaaaaatagccccatgcttggaaacccgcagttgaaagactcggctcctaggagtcacctgactagtgttgggtacctcctctttaaaaggcttgtgtcctaaacgtcccagaaatatcccaacatcgatgtgggaaggttgccagggcagacagaaatccaatgttcaattaaaagctcctccagctgtggctaggtcaggctttggcagaggccaacagccttggggttcatgggtgtgccctgctgttaacatggaggtggggatgggggtgctgtctgctcctcctttctacttaagcagcaccccctgcttttcatgatggagggagaagacaggctgactaaagagggttggtaaggggagggctccccttacctcccagggctgtctcttccctccacgaagggccgaatattggtcctcaaggtgttgtatctgggggacagtcagataacgcactgacagcataatggtttcaatgctcactgcttccagaaatcacaaacattctgggaaaacaataataacaacaccaccacagaaccacgggccctatcgggaggggaagatgtcttgggtcattgcgagctatttttagaatggaaaatgtgctggctcagagaaaactagtcatgtgccccagtccaagtagggcacagtgaaccctgccccatgagcctgctgttcatttttacccagccttggcatctcttctccttcaagaagcccttccagccagtggggaaagcgcctaggcaagagccagcttccctaaacatcactccatgaggacccacacttgactccttctggggcccctgctacctgctgtcaagttggttgaagaagggtcagtgttccaatgtggctcacctgcttcacctcagggctaccgtggatgtccctgtggtggccctctgtcattttctttttgtaaccaccatggtatttttcaaggtcctggacgttcagtgcataactgtccctcagtggagttggccatgtttgcccagaaagagtaacccaaacctatgctgcctaggtacctgttgtgggccaggggcctacatggcttatccactgaccttgacacaatgaggaagatatgggaatggtaacaagggagtggtccaccggactggtacctcgaggcacaatcagggatacatatgaactagaatatgatgcagtcaagcctggacttttggaaaggtaccagctacatccctcgtcagctgtccagcagaggggacccagcagtgattgtgaaggcatcacatgtgtgtgtctgtacatgtgtaggtgtctgtgtctgtgtgtacatggaagccagagaacagcctccggcatccgtccttaggcactcaccgtggtttgtttggcttgtttttgttttctgttttgtttttgagccaagtgctctcattggacaagtgggctaggttggttggccaatgagcccctgggacccacccatctctccctccccagtactgaggttataagcaattgtcatttgacccagctgctttataatttgtgttctgaggcctgaactcactctatgttctggattatcactccaggatcttcccaggatcccagttgtggctcactgccgtacactggcccagtctggcctcagcattgtgcaagtctgaagctgctctcttccttggaagaagtggaagctttcctctagcctgtggttaactctacggctgcccctgcaccagcccagcccactcaggacaaaagcagttgcctccttcccatgcagtgggattgacaatctgcatcccaagacccaagtccttcattacaagaggccagcctcactgagcaccctggagtatattctcagctccaggtgtaaaactggttcttatggactctcaagactcaggcagctacttccttcttggacacaagccagtgtcttccccagaggtcacagctcagtgccctgtggttggggcaaagtgtgtactcttttacagaactttgggtatgctctgacacagcatgacctaggagcttgtctagagagggtatgggatgcccatcagctctagatctttcctgaagctagtgtgggaactggcttagagcacctgggtgttcctattcattaatgtatcagttcagaagccaatgctcttagacttagtgagtttggcttgaaccacgttgcctgccattagactgtttagccagtgatttcagaagactgtgtttccattcatctgtcccaatgaagaaggctttcttaagttaattgcctggaaataacaccaagtttcttgctcagaaaacgacaatcaaaccaaaagcttcctatcaagggcttttcttgcactacttggggcagtagccacttggggaggtgaggggattttaactgtgggtcctctttcaggatgtgctttggagttactcagagagaaagaaagctcccttcccgaatctcactaccctccctccgatggatgtgcgcagcttagattctgctctgccaaaactaaagtgtgcacacacggtatgtgtacctgcaatcccagcatctggaggtaaagacagaatgattgccatcaatctgaggctagtcagggccttacagtaagaacttgtcttaaaaaacaaacatagcagaaagcctcagacacaaagccacagatgacaaatcttaaggcacactgcacagttcattcagatagcctaccagccatattttgccttcctggtttctttctaacaccttgaagtggtaaggaccttccttgccatcaatttaacatgttaatgttttttaattaaaattctgtatcatctaataggtcacagaattgtgggtgatgagttctttgttctagaacttcctgtgtaatgaaactgccatccataattgttttcctgtggactgcttattaaaagaagtgatttttgatgaactaaactaggtaagtgctcgcagcgtgaggcccattgggaatgaagcccttaccaatcacagctcccctccccccccccccccgaggtggggggatgcaggaggatgtgtgctttcagatgtcagtttcagctgattgtttctgaggctatgtgaccattattctgtatcctgtggtgcgttttatagactgatatcaatttgtagagctccattatggatggatgtctccagatgagtgcaagtttcaaaccatggagtgaagatatggagtatgatggcgttcagagggaaagtggagaagggtactaaactgtgacacctttcacctaagatggggtcttcctatactgggggacgggaatcctgctgcgcagagcctggagcaggcaaagccaatgaggcctcttcctcccacttgtggagacacctacagacccacgagaggctccaaagccacagcagggctgtggttttcatttgccttcaatactggagtcatcatgtaaaaatccagtgatttctatctcagcaaaactcagaaaagtagaccacagggtctacttcctcccagtgttagtctgctgaagccattattagccatttgctcgaggaccagggctctaagccaccatccagactgcttgctcagctctgtgctggagttaacagtgtagcttcagattgtagctgtaggtccaaagccaaaagaccctgagagagcacagagcctgcaaaaagacacatgcctcaacccatgccaacccttcctggggcagcaggaggcgggggtgggggtgaggggtggggtgggggattggtgttcgtaatgatttggatataaaaaaggtctctgcaagacttctgggttgaaattttaggcctcagctggtagatccaatcattgagaagttattggttgattgagggttatgatttaatccatgagtgtgattctgatgggtatagaacttgatgtcattagtgggaagtgaaggaaaccaagcccctgctcccactacagtgatcttgccacaggcttacaaccaatagaacatgtcaactatgagctgtaacctgacccaaaggaaaccgtcattcccccacccccgctacttttgagttgtttgcttaaggtgttctgtgtcctctctgtgtgagtagctagcatactgtctttctcatgggccagaactcaaaattcaagagacatcccaactgtagtctcctcctgggctcatgggggcggggggggggggggaagtaagtcgagaggctgaactgcagaaaagctgtgggaaggtcttgagtttgtctgtaactaatcttgaaccattttggcttttaaaattcacagcaaatccggcccagtcaacacatctgtggttaagtgtgaggcgcaaacacacagactgagtgtggatgggtttttcctcccgccccaccccctgactcctaactccatccttaccctgcaagttgtaatcttatcatgtttagctggttccacataaacagatctaggtatattttcagctgagacctgttaagaacagatgtgcacatggctccccagtgctgatccatttaagtggggtttccatcaacagcttcagttctctccccttccttgaagggggaaagaattaaaatacataacccccgttgaagtgggtatcacgtacttctgggttctgggcagcttgggtttgtcaatggcttccaaacagcaatctggctcctgaggctgtgagcacagagggtgtgtttgatggacaatgttggggtcgggggcacacacagtgagccagctactccggttctcccctgcacacgcgggaacctttccttgagaactacaaatcctctgatctgaggcttgagaaagctcttcacctcccaggaccgccaggcagcatggggtttggtggagtccagatgtagttaatgaaaattagccacatgtggaagggcattctgtctgattctacttccatgaagtgctaagagcagttaactttagagagatgccgaatggaagctgtcaggggctgaggggagggaagtggacagcgattgctcatgggctgtagagtcacaatgttgcaagtggcctggagagtatgttacacaacagtggggaggtagttaatgctacagagatgtgttcctaaaatggttaacagggtgaaggagataaagactggaactcatcaatgtagccaacagcattagtgacttttgttgttgctgtggccaaatacgtgacaagaagcagttaagggaacatgggcttatttttggctcgtgatccacgttggtgtgggaagagggggctgaaggggcgggaagagataggtcacgtgtcacactcagtcaggaagcagagggagatgactgctggtgccagcttgtcatttcattagatttaagcccacagcgaggtgctaccttcaattaagggaagtttccccgcctccattaacctacaggcattacccagaatccctcacaggcattacccagaggcctgtctcctaggtaactctggatcctgccaggctgattacatcaacatcgtgtcacttagggaaggatgtggggggatacagagataggcagacacctagtgaggtgtggcctgttgctcaggctggccccaactcaggtggggtgagcaaagtcgggttatgattgctcagattcgactccccaagaacagtcctcaggtgggcctctcacttctcccctgagagtttggcagcctcctacacattgcaaccatatggggccatctgtggtggtatcctcactgctcactgtgactcagagctgtgtcctagaggcctctcattctcttgcagcttcaggaaggcccttctttctacctccagttgtctctgggtaaagcagagttcaagttgtcctcttgtcagcttggtgctagccttgggaagcagggaagggggtctagggtagggatccaatcacggtgggcaagcggagcgaaggaatcctgcttcccaccttggtccacccacgtccccggcagcgtgggtctgcacacaccgctctgcttcgtttcatactgttaaaaggggagcaaaggattggggcgatagcccaattgataaaatgtttgtctcctaagcacccacagagagaaaggctagactctggggagaccaaggcaggctgatccctgtagctccccttgaggcttccaggccagtgagagattttgactcaaaaataaggtgaccaagactgggctgcacagcctctaactacctttggggtgggggggtaaagtcttcctaaatcctgtcgaacctggcagcctcttcaagacacagtaacatgaaaatgtaatgtgcctgtggctctgccgggacctccagggttgatataacctcaaacgtgcctctggaccctcgaggtggtaggcaatgggctccaagagcagcgagcagtatggagaggccctgaggctgagtctaaaccaggcgaggtaggcccttaggccacctgacaggacagggtcccttagagaggtgtgagcttgctaagcaggaaggagagtggctgctttagggggttagagcagcttcctgggggcagaagggagctcatttgtcttaatgaggaggaaagaacaaaaccaaagcattcattagcactttcagcaagatgaaagaaacacacttgctggcttgctcccttgctcatctacaagagtcagtggctacagagaaagaatctggtagagaattctgctacctgatggagggtggctcctgggctcctctttagttgttttaggggcaccttgtttgcaaggtgttcagccccatgggacctgcttagtagccagtgagagcaattcagacttgtttttttatttttttttttaaatcttaattgtgtcccacctttccctatgtctcaagttcttttacctagttgttctcttcactggcaattttagcttgtccgagcccaccccttccctcttgttgcctccccccgccccgcccccccccccccgccccactagaacattgataggtcttgatttctgcaagcaattctgaagtttccagaaccatgataccacttagttccagaacacacttggctcaagtttgtataggatagctcttctttctttccaaaaaatatttgtgagtgcatgcatgtgcacatacatgctacatgtatacctgtgtgtgcttacccttacatctaaaagggccagaattcagcatcagattccttctattgccacacctggctctttgtgtagggattagagatctgaactcaggttctcaagctttagtagcaaggattttatctactgagccatttcccccaccctgaagtagcgcttcggagcacaagttagaaattgctaaaatacaggctgtagctggcagtaaaggagttcggaagaagtacttgaaaccactcagcctgtaagcaggtgtcgctgattgctctgtgtgtgtgtgtgtgtgtgtgtgtgtgttttattgtgatctccagactgggatcctgctgggatgggcagaaaactccccctcggtccatcttctcttgactgttttcagatccccttcaccattcacaccgatgtccccattctctcggcttttggagtctttcatagccatcccttactatttccaaatattgccgggatcagtgcataatgggtgcattatgggtgctttactccaagtgattggcagcttggtgacctttctttttagccacaaatgaaaggggacttacaggacatgtgcacgcctgactaatacacacgctcttcgtgaaaaacaggataaattacagagaatggcagcataatgattacagaaaggtatatgaggcagaacccattagtgagctgcgttttgttcaaaactgagagagaggcaggcagaataacacgcctttgtgctggaacccactgagccatagcaatgagtaataacgcagccggggagctgtgcgcactgcctccacctcttgtgccgattttcataagttaataactcaagcgtggaaattgtttcagactgaacactggaggtagaaactgggcaagtggtgtgggaaacaacttgttgttgttgttattgttacttaatttagcttggttgtttttaagtgaagagcggcaaccaacgtcactatgggttttctctggtgatgcgttcctgttgaacctgagatagtttggattctgttacaccgggttcacttctagtgatgacagcagcgagcggcctctcttcttacaggtgttcctttctgtttggtgcaggtgggattcttgcgggggcagggatcgagtcaaaccttggaaatgacgtcattctgaactcatctgcctttatccagaagactaccaaagcaaaccagaggaccagagaacagcagctgctctggacaaagaggggaggacacccacacccacataccaagttctggttgacttctacagcagaagaagcaggagacacaagaaggtagccactcctattcgtggggagggaccaggtttcatatgggccttttctttggttggaacaggagatgttcacgatggaagaaaacagaataattcagtaaacacctcgacccacatcccccaaataaatgatcacttttacatgttacgtccccataccaactttgaaaactaaaaacttaatgaaacacagctcacaaacatgaaattatctttaagttcataaccaagcaaagtgagaggctagatagaaagggaccccccacctctctcatccttcaggaacaggatccacagaagggaattcccaggcaagtcagtaccaatttttgtcccacagtacagatgagtcccaacatggggcgtgggaatgagagcctgcttctcttattctggaccccaagtagaggagacagagctgaggatgaaccccaaggcagcctttgcccagccccagggagagggtgctaacacctgcaggtctgaagggaaagccagccaggcagggaggcagggcacagaaacaaataatacattctttagggagtgcaatctaatgcacgccccagccaagtttcattgaaaaggataacaaaaatctcttcaccaatttgccaccttgcaaggacaatttaataatgtttattttgttattagaaaattgttccatttgtgaatctttagtaacactcctccccaggtgagtccttttcctctctctctctctctctctctctctctctctctctctctctctctctctctctcaaactggccttttctaggtagctgaactaggtgtctttagcccattgtggagtttaaccagatcaggtagacccatgtgctggctgaggtcaccatcagcctgtatcctggtccattagctagaatcccagccagccaaggctgaaaatactcggatgcaatggagcccccggcttacacctggcttctaggttgatgcctctgtttgtgaactgatacctcgcttaaaagtaataagaggtcatcatcctgagtgaggtaacccaatcacaaaagaactcacatgatatgtactcactgataagtggatattagcccagaaacttagaatacccaagatacaagatacaatctgcaaacacatgaaactcaagaagaacgaagaccaaaatgtggacactttgccccttcttagaattgggaataaaacacccatggaaggagttacagagacaaagtttggggctgagacgaaaggatggaccatctagagactgccatacccggggatccattccataatcagcctccaaacactgacaccattgcatacactagcaagattttgctgaaaggacccagatatagctgtctcttgtgaggctatgccgaggcctagcaaacacagaaatggatgctcacagtcagctattggatggatcacagggccccaaactgaggagctagagaaagtacccaaggagctaaaggggtctgcaaccctataggtggaacaacaatatgaactaaccagtactccccagagctcgtgtctctagctgcatatgtatcagaagatagcctagtcggccatcattggaaagagaggcccattggtcttgcaaactttatatgcctcagtacaggggaacaccagggccaaaaagtggaagtgggtgggtaggggagtgggggggagggtatgagggacttttgggatagcattggaaatgtaaatgaagaaaatacctaattaaaaaatattacaaaaaatggtcatataatatttaaaaaagtaataataaaggaaggctcacgcaggcctaggtgttcagggtctccttagagaacaaggatggtaaagaaacacagtacttccttgagattctcatgccctccagactctcccgcccacctggagaatggttgcacagccttgttgcctctaaagacacaaacctcagggtttctggcactagcattgtattctcaccaacacagcatccttcttgatcttactgaaccctttcccctgcctatagtcagagatccggctctctgagaactctctggagttgccctttccagctctccttcagttaggcattgccttacctgtcctagcacagtaaagggaaggaaggcggagcaccaagcactgagcactgagcacttaatggtctggtagatgaattctaaattcctgggagaggggagcttgctcttgctggaggcgactggttgtagatagctgacttcacaaaggcaccagggagagagaactggggattaggaacagtgggggatggtaggcagaattaagacagattccttagtgagaaattgaaaagattttgttaggtctggagaaaaagcccctctgttctgggtcctggctggaacttatgtcagatgctggaattcactccccctcagtcttatgggtgcactatggcatcttgctgtgactacatattgtcactatatagtcagtctttatcttcactcacatctgctctaagtatttctctttaatttttttttttaatcacattcagggtatgtatgtgtgtgtgtatgtgtgcacattcattttgcttatggcactttcagaccttagattttcattttctccttcctatttttgacttttgtttcatgagtacaagagtaccaccactgcactttgaaacattcttatgatagatgccttaaaatgaaaatgtttgtcagatgggctgggagtggtagtgcatacctttaatccaagcactcggtaggcagaggtaggcagatttccaagatggaggccagcctcgtttacagagtgagtttaaagacagccaggtctatgcagagaaaccgcatccaaaaaaaaaaaaaaaaaaaaaaaaatttgtcagataacattgcatctccgtattggaatttactgatcttttttcatttggtttaaaagatttctggactttagcaagagtattttccattgaaatcttgttatctggaggaatgtatttaattattgtcttctattttaactgggtttcttacagagctcacacaggggaggttggatagagaggtacagctcactattgccaggtagaagtagaaggccaagttctccaccagcttctattgacatctgaagagaaaggctccttcttgctggtgggggtagaagcccaggctccctgacatcagggaagccctttccctttggacatggatgcaaagtctcagctctcagtcttcttgaacaccaatctggtgaggggtgggtgagcagagaagtcccctggtgacagtgggaagctaggcgtcatgtccctgccctatgtctatccgcctcccacccatgcatcccttcccgtctcccctccatttaggttgggcttacattttctgtagtggatcctggagtagaccactactgccttagactgttttctaggccacacccctttctaggttcttagagagagtaggtttagaccgtcagtctctttcttcagttccacacctgtgatatgtgagacaaccataggccgtgctgttcctctggttcccaggttgctagtcagcccatcttctcggctccttacagcgccttttgtattttccctatgtaataatatgcacacttcttagtgatgctcagcagccggaagggaaagggatattttcaacttcctgaaagtggaagttctcatctttcttatgagtacttgtcaaaaaagttcttcccacttgatctctgtttcacctcctaaggcaaatcttgtttttcttaaaataaaaattaaaagaaaagaaaagaaagaaagaaagaaaattctagattagctttacctgctctagaatgtcatgtgatcaatgcaagtaacaactgtgcactcatcttctggactcttctctcagtgtgctgtgtttgagcatctgataatattttataattcatgccctcctaatggtcacaggaagtcagggcaagaattcaaacaggaatttgaagcagaaacactgaagaatgttatttgttggctcattcatgcttcattagttctcttacacagcccaggagtatgagcccaggggattgtgctgcccacagtaggctgggatcttttacatcaattacaagacaatctccacgaatgtgctcttaggccaatctgatctaggcaagccctcaattaaaactcccttctcagatgactctaggccgggtcaagttggcaattttattatattaattttataataggttggagttggcccagtgattaaaagcacttgttgctcttgcagaatactcagggttcaattcccagcacccacatggttgctcacaactgtctgtgattacagatccaggagatctgattccctcttctgacttctgcaggcactaggctggcatgtggtgcatatacatacaggtgcatacacataaaacaactaaatctaaagagaaatgaaaagaaattagacctaactagaacacacattgagcttgcatattccttccttccttccttccttccttccttccttccttccttccttccttccttccttccttccttccatctgaacaaacaaacaagcactccagcctctatttagtgaacctgtaatctgaattaggaaccatttaggataattatcagtagggagggggtctggggacctctcctgcagcagccaataagtggtgacgcagaataatataaacaaggaatggacgtgtgacattagttagcaacacctgtcacaaaggttaagtaaaactgggtggatggatagggagtgtccagtggcctttggggagacatggcatcatttcagtactagaggtcagaggaagcttctgggaatgctgaatagaagacaaccctattaggagaaggactaggaggcatcttagggaatgctgggtttgaagaagacaggagactttcccccccctttttgtaagcctgtatctttaaatgtgttcatttcttggaatacaatgtatcttaggggtagtttacacatcacccatgaaccatggggcagacccaaggcctaaggaaggagtctccaaccaaggctgtgtggtgagtctcactgcctgctttcagaaacctgccaccacatcctgcgctgcccccccccaccacctttccaccacaccccttcttcaggggcatccccacaaggagtggcagtagagttagaaagacaagcacatgtggttgctagggcttcaggtcacgggagtggtgagccgttcagtgctctctgcttctagatgaggcactggtgatccagagaggctgagcaggtggctcaaagtgggtgagaggtgagccctgaatggtaaggtggatgcgtgaggttccagtccccttagcttttacccttccttccagctttaggattcattgttctcttcagttttgaagtgaggggaagaatgtcctctggggaatcagagcttgaagaaagttctagaatcaatcttagacagcccaatgtcagttctgggatgtttagctgggaaggatccaggctgtggacctccccatggaaggcgtaggggatcagggtgggaggagggcggtggtcatggcagctgcttggattctggaactgggaaaacctgggctcaaatccaggctccactgactgcgagggtttgggcatattgttggaggcctctatacctccatttccacacttacaaaacggtgactaacatctccctggagatttgattgagtttcccaagacaaagcattcaaagtgcttagatgctagcaggcccagggcaactgcctaataggtactggctgctgttttcattcaccattgttctggaaagcaagacaagcattgactacacagggaggtggccaggagccgcccaggctgctccttccttgctcagcccacgacctgcaggagaatattggtgtaggggacccaacttcctgtatcagtgggactgtgtgacccgaggggtgccttccaacctgcagggtcagtttgcttctttgcttccatagctgcctcaggcagcagtggcggagggagaagcagctggggttggcgctcagccactccagctgtcgtctgtggtaacgtgtttatctgctccagagggatagagatggctgagcgaggaagcatgcgggaggctgtacctcacggtgacttgccagcttgggtgagttcaccgtggacagcaggcaagggtcacctcaccatgggttgtggtaccctctccatgctctgcaccaatgagaggcagtttgaaaacttattataaacagattacatttcatatcctaatgtggctgctggctacctgcccgtgaattttagcctccaggaaagaaacagttccgtgagcagagtattctacactttgactctgcttcttaaggcttctcccaggtccctttaacaacccccccccccctcctctgggcttaaccagaaatgctggaaggtgctttctacccagtcaaagccaatgagttgtaccctgcactaacacacacacacacacacacacacacacacacacacacacacacacacacagagagagagagagagccaggaatccagtacaaaccaaatgcccacagcagcccaggaacaatggaaagctgtctccatgtccactaagggatctagcacacactccgctgatggtacctctgctccagtcagcagctcagatggccactctgtacacccagatgtttggtctggcacagcaggcagctgtcttctcctggcttttctttatcttaaagttggaggactggatccacaacaggattctaggtagaccaggagcagtgtgagtagccatgggaatgttctcatttgcttggggttcaagagtatacatacatgttaactcttaacacattaacactcagacatgtttatatatgcatttgtaaatatgaaaacatacacactcaggcacacacaaagtccccagtagcaccacatactcacagtcccatgggaactatctgaggccacttagcatttatttgtagctcatctttttttctttctttcttttaccccctccttaaacatgggtgttgcttatttatttatttaatatttatttaatgtacattggtgttttgcttgcgtgtatgtctctaaatgttgtgtccccaggaactagagttacagacagttgccagctgccatctgaatgctagaaattaaacccaggttctctggaagagcagccagtgttcttaaccactgagccatctcttcagcccctcaccactaccaccacccttttttttttctttctgaggcagaatctcactatgtagccctggctctactggaactcactttgtagaactacttgatcaaattcatagagatccttctgtctgtctctctgcctcctctgcctctgcctctgcctcctgcctctgcctcctgcctctgcctctgcctctgcctctgcctctgcctctgcctctgcctctgcctctgcctctgcctctgcctctgcctctgcctctgcctctgcctctgcctctgcctctgccatctgctgttgggagccgcgcccacattcgccgttacaagatggcgctgacagctgtgttctaagtggtaaacaaataatctgcgcatatgccgagggtggttctccactccatgtgctctgccttccccgtgacgtcaactcggccgatgggctgcagccaatcagggagtgacacgtcctaggcgaaatataactctcctaaaaaagggacggggtttcgttttctctctctcttgcttcttgcactctggctcctgaagatgtaagcaataaagctttgccgcagaagattctggtttgttgcgtctttcctggccggtcgtgagaacgcgtctaataacaatctgcctcttcaatgctgagattaaagcatgaatgtcaatttagtagttcatctttaaaaagtctgaatgactgtttagaattaatggttgaatgcttggtccctatttggtgaaactatttgggaaggattaagatgtgtggccttgatggaaatgagctttgtggcttcaaaagattcaccatttccagaacactctctgcctcctgcttgcagatcacgatgtgagctctcagttgtcgctgctctgcctttgctccagtacctcagactccagcactctcgagctgtaagcccagataaaagccttcttctacaagccaccttggtcatggtgttttgtcacagcaacagaaaaagtaactaagatgctgcatttgtgtgtctctgtcactggctggtgtggctctgcagccgtggttctcgaccttcgtaatgctgtgactctttaatacagttcctcatgttgtggtgacccccccaaccctaaatttattttcgttgctacttcataactgtaatcttgctactgttgtgaattgtaatgtaaatatcttatatatgacccccaatagggtcatgacccacaggatgagaaccaccggtgtagagggttaactgctggagtgtccatgtccctggaactctctcgttacagtgaatggtacagagacacactaatagttacagagatggagaaactttattaaagtgcagacacgggaggcctggagctgggccatgtctcgcctgtgacccagctccaagacaggagaaagcagggactgaggtgaagtccctgctgatcttgaatgggcccttaatgcagtggcctcgtttcccatctaaggaagcatgctttttaaaatgagctgtcctggctgaatgaagctcaggtggactgtagaggctgttgtctttccccacagccttttgtgtgttcatctctggaatttcccctctgctggtaccctgccttctcaggcccttgcagaacagggtcagcactcggcttagagagctgaccactacttgcctcctgcaagggtccagagggaagacagacaagggagaagcaaactgtgaccagctagtactagaaagccaggaaaggcagagcttgagcccaggggcaagggaattcactgttgacacccacaggcagctggccagacccctgacagcctcactgccacctccttcacaggatgacagctggaagcttgatcagccaacccttccataaaacccccgagtggctctgatctccattctaggagtttgctggaggaaccaaagagggcatgccaaggccatcccgcttgggtcttggcacagagcagtcaccaaaggccaaaggcagattcagaggccagcagttgaatgtgttgatgctgtaacagagcacaaagccacaatggctgacaagaagctgtcagggccaccgcaggtctgtcctctctcgagggcctagcctctgcgagtgctgtttttagagtggggcaagacagacaaatggtgggatttttatttttaacctggactgagcagtaggatgaggagaccctgagctgtgaacggggtccctgccatgaacacactcaccatcagttaacacctccaaagcttgaggctggccagcagctggcatatgttggctagttccagttttaacgccatactctcctctgcttcccactaagaggaagcagagtggctagaagattgctgttgtggacttagctcatacagagctgagggctctcccagacagcagagaagggacttctccattgaccctactcctcggactcacccagcagtgtgacccgtcagaagtccaagtggatagagtatgcttgaatgttcagtgatttgcctatagaatctgcccgcccctgaagaaaaaagatgtgggttttatgttttacatttgaaatgtattttaacagatggcctgtacacattgtacaaagaaaagatccaagccagtgtgcagaaaagggaccctcctgcctctgtctgtcattttgaaatatatttatatgcattatgtgtcagtgtgatgtaggaggtggtgtttggatgccacgacatgtatgtggaagtaaaggaagattttgtgaagtcatttctctcctccacctttaagtgggttccaggggctcaaactcatgtcaccaggcttttgtggcaagtgcctttatctagtgagccaccccactggctctgcctcttgaacatttgtttttcttctactgcgatcatattccccaggatccgatggagctttttttttttttttgacacacgcaaggtaggacactttagtttgtgacatgaaggacagtgtgctgtgccgctgtttatttaaccaatttcagaatgtcagacattcagggctgtgtttagtcttcagtgaatgcaagcggtgctgcctaaagagcttgatgggtacacaaggcttacacctgcctgagcataccctgccatcggttttccgaagctgagctctcaggtaggggattagcctcagtagtttagatagatactgtcaaatcatgctccaccataattgtttcatcttacaagcaggaggcaggcagaaggatgcagtgtctagacactttggatatgacacataggaaaatttggcagtcctgaaggtggatagtgatgtcttggtttaggtctcagttgcatttttcttttccgttctgtagtgttgagtattccttccaatgcatatgatactgtacttcagtctccacacctcgggaaccagggtggccacatgatctaaggtgccccgtctcgttagctcaggtctttgcctgtgtgtgtggtggatgcttttatgttgtcattgttgaattttttttcagttgatttattacagtctttaagctagggattctgtgagttgtctgagatactgattttaagtaacttgaaggtggatttgcatatgtgattctgattggtttggccctggggaccgtgatgattgccccacagtgtcagcttgagtggatttcagtgtgactctgaaggtgtatccagagaagtttagctgaagagggaagactcaccctgactgtaggtggtaccatcgatggaccgggattccagactgaatacaaagagggaaaggagaaagggtagtgggctggcagggttacaggcttacaccatcacgcttggcttatgtagtccaagggattgaatccaaagcacaatgaaggttagtcctgaaccctatcaactggccaccttcctggccctagccttgcacttacacaaagagaaaaatgtccagttgtaaattgctttctttctggtagttgtctataatgatgggcttacaggtgaacatcttcttttgggggaggcagggaagcaaagacagagacaggaaaaaatggctctagggctggagaggtggctcagctgttaaaagcacttgctgctcttgccgagggctcacatgccatcctcagcacccacatcacagtggctcacaactgtttgtacttctagctccagtgtatctgatgcccaagggtgttcacattcatatgcgtgtacatgtacataacatgcagacacacagagaagtaaaataaatctttaaaagaaatggaactgatatcaaacaaaggcagggcagagtatgtcctgagagtcacagtgggtctcttatgctgctggaagctctgtgcttcctgaagtagtgacaggaaatgattacgtcagcctggaccagatgtggctcttcagaggctatggcacctgtccacacatactgcatgggtgtcaggttccagggaggcctgattcagccttctgaaacagcacacacatctcctgcctctccccgacaagaccacgaggaagaaaataagaaaattcgtgtgcccacatgacttgggtccttgggggagactcaaggcttccagtgggcatcaacaggcaactggggagatgaaggcaggaggagtttatttttggcttcatagaaagttttgggccaacctcagtttaaaaccctgtcttaaaaataaaaataaaataaaataaaataaaaatgtaaaagatgtatttcattttacaaatgtaatgtgatcaattgcttgtaaacacacacacacagaacacacaaacacacaacacacatacatacatacacacacacacacacacacacaccatctcactaaattaaaataatctcagccaaccctcttgacagccctgggagcaggaattatgattttcttcagtgaataagcaaggaaaccaagtgcagaacttgatgccacagctagttcaggaacatgagggtcaggcccggcgtgtgtaacagtgtaggcccatctgcactgtgttccttgtccctgaacactagtacttactgtcttctcacccacagctacaacttggctgtggtttagcccctaaagggtcatgtgctagttgagtggagaggcgctaagggggagggacctttaaggggtggagcctagtaggaggcagttaggatgtgactgggtcaattcttgtagggacagattgctagatgagaccgtgatgccttctttgagtcctttgctgtatgcaccacctttgacacagtgtgccatttgacatgatgtccttgccagagccaatgccttgaatggtcagaactgtaacctgaataaaactcttttctttagaaagtgccctatctccaatattctactgtgataacacagaaagagactgtggaagtcactctgagggaggcacgttgtcttactatttttatttcatgggtttggctgtttatgggtttgaatatttttctatattttataaatcatttgtcttgattttcctgctgtcttttcccatttttcaatatctttctctatgtgtgtatgtgtctctgtctgtgcatgtgtgtctgtctgtctgtcatacatgctgtctagttttcttcttacctttactgtggtcttttccagcttctgagacattttagataatcttgaagtgcccctcctgcctgtctcttgggtgctcacattgcagacatgaacctttctgcccagctggttcccattatttttatactcaagaggtttgcatccctcccacataaagacaaatattcattcctatctttaaggtaggaagtgggtttgtagtctcttgttctgtctagaagttatcggtatgttttttttttcttcaaaagtctcctcagaagaacattgaccagcacgcctgcatcctttctgttctgacacacttgttacctggatgacttctttctcatcacccacgtgccaagagtgccatgtctcatctggaccagagactctgaggatcacaccaacagagacacaaatgacacttaaagaaagccacatcagcttttacaacttaccccccaataccgaatgtcatcaactcaatttaaatcattggatggttctgttctcagggccagagagtttcactaaacttcgtcgaacccttcggtataactgtcaactgtgcagagtgtgcttggtgtctggattctcagccttcagtgtaatcatgtttacatccccaggtgtcagaaaattccccctgacccttaacccccaacccttagcatgttggtgtcttagcttttacaatgtcattgctggacttgactgcttttcacaaaggtagctgcccaactagccatgccccaaccagtacattcttcttggttgcattcttaaattctcagactttttcttaacaaatgtgacaactgaatgtttattggtgttggtttggacttcatttaatcctgttaaaaccagtttgtgtcagtcacaatctggtggttcattgattgtccttctctgaatccgctcaccatcacatttgacacctaggctttcattttttccccctgagtcagggtttttctgtgtagccctgggtgtcccagaacctgctctgtagaccaggtgaactcagagattcacctgcctctgccttccaagtgctagaattcaaggtgtgcaccactaccctgagctttctacatttttatgtctttgaatatcaagtttgcagtgagaaaactgaggctcagggtggtggagtcacgtgaccaaagtctcaagactccagaggggagctgagctgagtggtgataagggcctgtgcttctgaaaccagggcacatggccagagcagagtagcagtcgacagtgacaaggacactagtgtcacacccaacagtccactatgaagtcacatacctgactcatgacaccctagcaataccaccagccaatccacttcctaacatctaaggatctccaaggactccagcaaatggtggtttggggagaccaaggtccctagcacagatctaagagtctccattgtggaacttcaaagtgttcagggttctatccgggcatccgtttgactgggaatccttttttacactgctccatatttgtccatttcaaaaatgagaatatactttgttcactgccttgatgaaattgatttcagtttaatcagttgcaccctgtttaatagacctgttataaaagatgtgcatttgtgtctatcaaacccacgtggtcccctgtattctttctgaaatgttgtcaatcctcgtggctaataagtctacaatagtccaagaattcctgtcaggcattcactttttataaaactcactcaattttgcaattttgacagtttttccaggagtggacttccccacaattagtcacttagtctaattagtctaagagcagctctgaaggcgttcagatgttctgggctgatcacctattgtcattcaggacctgaatagcaccttgctcatctcccatcacctactgtttctcgctcatgtgtatgggggctggggggtgtatggtgtgtgtgtatatgtgcttgtgcattgtgcatgcaaatctgtatgcctgtgcactcctgtgcaaagagaggagaagggccttcagtgtccttttctatcaagctccacttaattcccttgagacaggtctcacagagaccctgaaactcaccattttccagcaggccccagagctcctcccaaccccctcggccttctcttccaggttaaaacaaggtccaagaaacactgggaccttgcccttagttccctgacctacactgagtgtgacaatgggatttccctctaggagctgttgtgaggaccatcggctaccacaccattgtaattaatattgatatcatttgtacatgatattgaaaagctttgaggtcacagtgtgatgatgacctgattaaacaggtttgaacatactgggggttcaaacccagctattcacgcctatgtaacatgtctctaccaccagaccccaccctgctttttcttttcttttcttttcctcttcttcttcttctttttttttttttttggatacaggattcatagttgtcctgccaaaaagaatctctgactccaaggatgttttctcaagggattcccgcccgcactgccagttaccatcagcaggactcctgactgcctgactccactccatttctcatggaagccagaaggtagtgcaggctgtccccacccccagggtgacaaagctgtgatgaggagccaccccagaagagggaactggcacctcagcctgagaactggccctatggctaaccgagtagaggaagcttaattctttcttttttaattttgcattttattttaaatttttattattaaaatacaacaaacatatcaataatattgagtattttgagaatcaaataatatataaaaaatttgttcaacttttatattcatatcctttcataccctaaaagcatcattaatgaatatttaatactgtccataactgaggattctgtatctaatgttgaatactaaattgtttcaaaacatacaaaatatttcttgggaattaggcatagtaaaagagcataaaatattaaaaatgaatcattaagaaatacattcaaaagtccttatatgataccacctgacatagtgagagagtatttaaaactcattctatatctgtgtacatggtctaacaatccgcttatttaagcaagattatcagtgtttctaggagagaaattattttatcagtaagcatattttaaaaatttcaaaatagcaaaaactttgaagttaaacattaagaaaatgctaattttaagcatgagaaaaattattaatactatttccatggtgtttgtagaccatgaccgtaatattctcaactgttaatattcaacagacagaatagttattttaagatatatttcattgttttctctcccttttcatttctgattttattaatttggattctgaactctgtgccctctggttagtctggctaatggtttatcttgttgattttctcaaagaaccaactcctggttttgttgattctttgcctagttctttttgtttctctttggttgatttcagccctgagtttgattaggaaacttaattcttagagaggcgccttccccactacgcctgttgctactagagaggcaactcttccctttccacagagcccctgacagacctgaggagagtgggtgccagtgagtcctgagtctcctgcacagtccctgccttccctttatctgcagcctgggcattcttgactcttgtctgacatctcccacccccttcacagtctaagagttggtaattaattagccttgaccttaacctttgacaccacccagccatccagatgggttatccacacctggtaactgacctggggtcacccctccactctgcccagctgccgccctactgggctgaattttatgtttgcttgtctttctctgaatcagatttttttctggtcacttactatagctgacagctccatgctggcatcactcttcagtctgaaacctacagctttttttcctcccttactctgatatactttcttcatttgcttttcccattgggcccaagaatggagatcagggtgtgctgtctttgaatcaaggtggaaatgtgtctacagagtcccctccctgccccgggtatcctgagctactgagctaagcaatgtggtaaaggattctgtcctgggctgacccaggctctacagctagcaatacagattccccttgaccccagggtttcctccagggagcccagcatcctccctatgagctgctcctcctgctcacattctttagctgatgcttttgtgctgggttctatccttgtggttttctgcatttattgggggctttctgcattcctcgctctgaggttgccatttgaacagctctctggtcaccctggctagaattcggcagctcttctcccatgttggctggtacaccctgcttcctgccaggaccctgctgctctcggggtggatctgggctaagctccagaagacacaattcccagctctgactccatccacatgcccagatgttcctctgctcatttctcctctcttctcttccaaagccagggagcatcttgagtgagagaaggcacaagcgggtccacagcactcattcggtccatttcctctcaaaaactttgtagcaaacacaagggtgggcgtggagagcagattcctcccaacttggaggggcctcacaagccagcgctgcaggccttcactcccatatcatctctgaccatttggtagtgactgacctggctacgacatctgtgcttaagaagagtgtgcaatgagggattctcagtgcctttggagctcaatattttactggtctataagcaacctgctacttacgttccaagctgagaacctagccgccacacatacagcagtgtgttcgaagccacagttgagcagggcagatctgaggatgaaatccaggttgtccagcctttcctactggtgtctttaaagctgaaagctggtctcttaggaggtcagatgactgcctgcctcccagtctgtgtctattgctagctacccggagtgcaggaaagggggagaggtgggctggatagggcagacagggtatgaaggcagaacacaaatagaagctgcaggaggagccagcacactgggtgtgaaccttggagacacagcagagccagagatcagagcccctgggaatgccagttggggtgggggtggggggtgtggtgaggtggggtggggggctgccgaaactgctgctgggggtgggggtggggggtggaaggatatttcacggggccagagaaaaggagtccattggccttagtaaagggacaacatcttgttttattaaaagcctgttgctggctggataagccgtctgcctgctgagtgggcaggggcccaatattactgtggctaattcggagccagtgttggagagctgacatcaaaccaggaaacgctcgcgcgcgcggctctctccctctccggctctccctctccctccctccgcctcctcttctctcattcttgagcttgaatctactgtgcatgatatgtgtgcatgtgtgtccgtgtgtctctctgtgtgtgacattatgtacacttgctgggagttcaccccatggctccctcctcctcttcctgtcctctactccctctgccaagcaccccagccccacctttgcccctggcctcctcagtctccgcccccagaagacttgaacagagaagacccagactatggcctggggttatttactgagacgcctggggaggaaagtttcgaaatgaccaaacccacccctttccagatctccatttgtaggttaaaagaaaaagtaaaggaagtcatttcaaaagaaaccaggaggaaagcggctctcttcggcagcatgtgtgattattattaatattagacttgtttaaggcaagggaaaaatgtaaaatggcttttttcctgtttttatcgtagttttttgttgttgttggttttgttttttgtttttttgtttttttgtttttttttttccttttttcttctactgtcttgggagtcagaagggcaaacagtaatttcagagtaagatggaagccatcatctccttagttcatgtgatgtctttctgggaattgggagagtgaatgagtttcatgtaaacgcctataatcacttttcctgctaaggttttagaggactctgagtctcccaatttgctgtaacttaaagtcacccaaattgcttccacttttaccaaaaaaaaaaaaaaaaaaaaaaaaattaattatttatccagattttaagctgtaaaaaaaaaataaatgaaaaagtttttttcactggttggttgtctgaggtgacttatttaattctttgataaggttaaagcaaattgcccctatataaaatagaatatgataatttattggcatctctgtaaccctgctttcaaacaataaactttgaatgaagagccagaaaggtataaatgtctttaaattaataattttaatgtatcattcacagagataaggggattccaagacaagagaaacataaagtgtacctgacaatatcttactacatgttgcaagcaagaaggcatattgtgtgtattatgtatgtatgtgcatgtgtatgcgtttttgtttatgtatgtacatgtgtgtatatgtgcatgtgtgtgtatgcatagttggtataatttcactatgctgaggttatcatacaaaattcatgcactgattcctaaccacagtcctaagcctgtctccctaaggctactcacccatttgacatatcttagaaggtcgttttctgtctttgacagaagtctccgatttgacggtcaggatcccggagaagactctccagccacagggctgatcatggtggcttctctccagatgggtgaagtagagcattgcttttggactctgcttatatactggccagtgggagccatgggattctaggcttatgcctggttagcttgagtaaatgatgggactgagttctggtgaacaggtatagccttgggtgtagtgggatgctgactaagctattttcacatgtctaaacagtatttttttttaaactatgcttcttatacttcatatttgaatattccgttttttaagagggacggggagatagctctgtggttaataatgcctgttgccaagaccaatggcctggaattggtgtgtgtgtgtgtgtgtgtgtgtgtgtgtgcacttttatattatttatcacatataaatcatcatattgatataaacctaaatcaggtaaacacacagctttttctatacgtatcaatactttataaattaacttcatggaagtctttaaaattatagggacaagtaaacatggcacagaaaagagaacagtgtggcacattaaatccagcctaccttttctaaactttgtctgtgaggttaaaaaatgttcaacaaatctgatttttccctgtcctctagttaccaaagagaaagataatgagaagattactgtggtaagggaacgcacaagaggcagaatccacccccaccccagcggggcatgggggctctatcagctggcagggtgtgtttttctagaatgtctttgctggttgatttaaaccactaactccaagtttttaatatagcactttccgtgagtcactgggcagaaagcccatcccaaggcaggcaagagtccaagacagaaacaagcaggatccagctacaagctggatagcacagctaaacattcataattaagaaagctccagtcactctgagattgcctccttcttgataaaagaaggaaaacgttattgaaaaccagggtgagggaagggaacctccgagaaaatgctgaccagcagcaatgctaacaatcaacttggtgtccaggggaggagtggcaagctgcttagctcttcaaagggaactcagcatcctgcggactcagtgcagggcaggtgcacacaagtgcaggaggccgaccggtcccttctgagaaagcagaaggtgggggtgggatcacaggaggccccggtgaacaaattttttctgcgtggaaaatcactcagggagcaaaacatgtccaagccttaagaacaagctgtgctgacttccggatctggaccaaagcaatgcagatgctttctccttcccttataaactacaaagaactgttctggaagtcggtcaacagacagcgataagagcttgaaagccgagaggaaaagaggatgtgctggcaagaaacatcaggagttgagaaacagcgctatggtggatgtgttctctggcattccttcttctttcccattcaacctggcctggctcaagagaggtctgcagtgggaatcactaaaagactcagataagagcaccctcagagacatccttttctctctggctaaagtccatgcaaggagagcccaaataaagacccagtcatataggcttctgtccctttcttagaatccaaggtccctctagtctgatctgccagcagcagcagcagcagcagcaatgccaccaccacatctggttacagctgggacatcagcaggtgatctgtcacccacagcaaggaacagtgaagtcctgaatcttcctgactgcattctggcattataaagctaggcctcacagccattttccacacttcccactccatattttccaacagcagcaacatcactaaggaagtaataaatatattctaagaaaagtataatgaaatcaaacagaacttttgagaaacatcaagaaacatacagaaaggccagagaaaacagaacactagacacagaaagaacaaatccataaggaaatgtcagacttagcccaggtcaataattatcatgaaggcaaacagtttaaacatacctatttaaaatgcagagattggtagagtggttttaaaaagatgacccacctatatgctacttccaagagactcatgtcaaattcacagatgtaagtaactcacagcaaaagaatggcgggctgcattaaataaaagcatcctacaggaaagttactgtgggcaaagagggatgttttaaacaatgcagaactaatccatcaagaagtgataactgtcttgtgaagaaaacaccaaaggttcacaggtgtgaagcaaaaagtcgagtgaaagaagaaacacacactcgccaactatggttagagcatggtctccatccattggaactagagacaaagtcaacaagagcataggacccagcatcagccacggacaggtatctactcctaccctagcacattctgtctaacatccgcagaatacagagcctcaaaagacccatgcaatattcagcaaggtagagagcatcttaggtcataaaacagagttcggatttcccagcacatggtgacccacctgcaaccccagggcacaggaggaagagactagggcaagctggctagctagcctggctaatctgatgaatttggttcagtaagagatgctctcccagtaggtagagaagaggactagcagaaaacattcctgatgtcaacctctgacctccacgggtatccatgaataagtgtacacacacacacacacacacacacacacaagcacacacacacacacacacacgcacgcactcacacacatgcaagcacacacacacacgagcacgcactcacacacatgtgcgtgtgtacagaatatggaatcaaactagaattaaaccaggatgtcaagagagaaatctccacatacttcagaactaaacaacaaaagtccaggagtctcaggaaaagtttcaggtacacagaactaaatgagacacacggcaaccattaacatttgtgaggtgggactaagtaaggcaaagccgagagggaagtgtgtgggactaaacagatgccttagaaaagagaaagggtctgcatcccaagagaagtgtctgcttctagaatatagaaagagctgagcagaatacagtgagcagaagcgggaccagcacaatggtatctaactatcatgcaatgggctacggtttggatctcggctgtcctccaaaggtccatgtgttaaagactcagcctcagcctaagcttctatgaggcagcaggaattttaagagggttaagtgggggaaaagatgagttattgagtgaagagattcttacagggatcctgggacgctggcccctcctttttcttctcgtctgatttctagcatgaataaaagatgccacctctacttgtttccacagtgatgtactgtgccactatgaccatgggctgaaatttagactgccaggaccagaaatgaatttttttttctgataaatctcttaacacaaatgtttgttaaagtaacaaaaagtaaacaggtgctgtgtatctccaaaatcttgaagaaaggaatttgaatatgtttatgatgtatcacaaacatctaaaaagatgataaatatgtttaacttggtttaaacactacacagtgtatatcttgcatcatcccaatagttacatgtgtgtgtgtgtgtatatatataatgatttttaaaaatcagacttatttattttatatacacatatgtatatatttataagtgttttgcctacaggaatgcctgtgtatcacagacatacctcgtgcctgtagaggtcagaagatagtgtcttctgggactgatggtatctgaccccctgggactagaggtacagatattgtgagacaccatgtgggtgctagaaactgagccagacaagagctcccatggtttcagtccgttctcctgccttctagagatggagaattagtgagagaagactcccttggcacaggcatgccgtcctaaggtgggtacatgctagtatgaccaggtgcaagtgtagagggtggatgagggagccaagagccactcttggcctcctggtcactgcctccacaccagcaagctacctgggacatgaggttcccttttgcagggcccgggttagaatgttcataagaacagctgtttcctttaagcagcgatcggttagaatgaatcaaagggctacgtgtctgggtctaagaatagccccatcatttctgacagggacttagctgggatggaagtcattccttcaggtgcagaaaaggaaagtgtggcctgcgtcactgacttaaaataggtcggggcttgcaggtgacacatggttagtttctaggttggtatttcctatatttcctgtttgggatataggtttctgccttcttttctgaactggtgtgtgtgtgtgtgtgtgtgtgtgtgtgtgtgtgtgtgtgtgtgtgtgtgtttataatgtttgcatgcccagctttctctccactccatctgagatatttctttctctctctctctctctctcttccttccttccttcctttctttccctccctccctccctccctccctccttccctccctcctttcttcctttctttcttccttccttccttccttccttccttccttccttccttcctttctttctttctttctttctttctttcgttctttcttttgttctttcgttctttcaatcattctttctttcttctttcaagacaggatttctctgtatagccctggctgttctggaactcactcagtagaccaggctgacctcaagtcagaaatccctcttcctcttcatcaggagtgctgggattaaaggcgtgcgccaccactgtgttactacttctgtcaaggctttaccagctgtggtaggcactcatagaaattcagtcaactctgttttctccttagctctccccagtaggttcacaaggttttgacatactggtaacacaccagcagagcagtatagtagaaagaatgtgctatcctggggtggaattttccatggaaagggagcgtaaggtcctaagcagtcagaagttttatttctgttcacggcacagctttctttaagctttcgaatcaatacatttgaggtagacattttcgtatattcctttgcgacaagctggcaaggtggctcggcggtgtcagtgctctctgtgagaggctgctgacttgagtttgatcccacagaggagggtgagaacagtttcctgcgagtctgacctccacaggaggccatggtgtgcccatccccccacacccacactcttccacttagtaagaagtacgacataataaatgtaaatttaaatcaaaaatactttgtgggcctggagaaatgacttggcaattacaaacattcccccccatctggaagactagaacttggctcccatcagccacatcaggtggctcccagctgtctgtaactccaggtccctgacacccacttctgacctccctggatgcccatacacataggcctggtacacacacatcattaaaaataagtcttttaagagctactttgtggggctggtgagatggctcagtgggtaagagcactgactgctcttccaaaggttctgagttcaaatcccagcaaccacatagtggctcacaaccatctgtaatgagatctgacaccctcttctggtgtgtctgaagacagctacagtgtacttacatataataaataaataaatcttaaaaaaaaaaaagagctactttgtgaaggggcttctgttttagacaagctaatgtaggcctgtcttctttcctcctaaggaaagactaagggcaagaataaactcagaaaaatatgcaagaggcatcagcaagagaactctgagagttaaaaagaaggaaggcgaggtagctaggatcattgtaggactggaggtagagcggggagcagatacatcttaatcccccacacggaagacttgaccttagcctggcacttcccaaagccagccaacaaggattcagtccttccctgcacagagcgcccagcacctcccccttcttcactgacagacacatatgggaatcagacattaataagcagccttatttgttacactcttgctctctataagtctgagatgtccttttcttctggagtacagactaaaaagagatccctcaaattccaggcagcaccagagaggatctggggaagcttcagttatttgagggaaattatgaagctagaatgtcactgggctcataagagaaatcctttaagttagacctaaatagagcaaaagcctaattaagacataacataacataagaggcagggcatcctaatacagccaatgcacactgcataagacccagggaactcttgttaaggatttattttttacttttagttatgtacacattgtggatacttgggtgggtgtaggtgcctgtaggtacaggtgcctgaagaggccacaggtggtagatcccctgcagctgcggagtcagccccacatgagtgatggcaattgaactctgggagaataggacagtgctgagccatctccccagcccagaaccagggaaacaaatgagatgtgatgacgtgctgacaccgtgtgaagactagcctcgatgtcatctgaaggagacttcacagcagccgtcagaaaagcacctcagaacacaggctcggcagagcctcccaaagtgagtgaacagacaccagagaaggctcaaaaacgccttgacaggactctgctcacaagtagactgggtaagacaggagcatctgtgaaactggtgaaagaaaatgcagtctgaatgcggaggggcgtaaagcagagaaggctggctgctgctcttcgggaagacttggattttcaaattgctgtattaactactctgcggggggtgggtaatcagcttaaggagaggacaaacaggtcctcacgagtgacaaatgattgcaacacttaaaaatcaaatattcttaatagcatcaaaggtgcatagaaataaacctaatttaattgaaagctacagacgacagagttattattgagagaaattaaagcagtcaaataaatattcatgagttagcctttttttttatcaagtctatgttcaattcccttcaaacgaatctagagcaaggtctgtatattacagcgagattttagcttatttgtagaataaattggattctttatctgaaaacttaaggtgtcataaaggatgggatagatgatagtcttcataaacactgtggtgctgattggacaaatctctggcttcagacttgtgatctgcctcggccttctgagtgcttggattgtacgcagtaccatactcagtctttattctattccacaccaacacatagtcagctaaagggtaatattaatattaaagacaaaataattacatttgtgaaagacagtaattgcaagaccttggaatataataatgttctcaactgtaataagaaagttctaaagagaaggagatggtcaagacttgatttaaacagaatgtcaattgtcatagatagctgctaggagagagaaaaggcaagccacacacacacacatatgcacatgcacacgcacacacacatgcaccagacacatacatacaaacacatgtatacacatacatccatatgcacgcatgcacacacatacacacatgcaccacacacaatatgcacatatgtgagtgcacaaacacacacacacagagggacagagagggggcggggagagagagagaggtttccaattaaaattctgattaaatgtttttatgcagactgtatgcaaaacttccatatcatgagcagctcatcacagcaatagctaggaagacagttcagtatgtgaagtgtgtgttgcacaagtgtaaggatccgagctctgttcctgaaacccattctgagaaaaaacaaggtgatggtgatggatgcttgtgatggcagagttcaggaaataacgagaagtttccaggtggtcaacatatgaaaaacaacactcaaggtggacctgtagtctccacatctgcatgtacattcctgtacacacacacacacacacacacacacacacacacacacacacacacacagagagagagagagagagagagagagagagagagagagagagagagagggtgattttcaattagccaaagtaagggcagcaaaacgcgacataaaattccagcttgctcccaccactgtaaaaccccagagtcaccacaaaatgtacagagaaataagcctcacacacactagggaaaaaaatggtttaactgcagctgtcatccactggccagtgggagaagtttccactgtgggaaacctctggacaagggtcttccacagctgaccaagtgcatatatttgatgagccagaattctactccaagggacatacccaacagaaaggcactcaaacaaacacataaaatgtgatcatgcagctatattaatcaaagactaggaataacccaaatttccattaacaatgtaatatgatgacagtggatggaaagctgtgcgtagcattgaaattaaataagtgaacgagatacagaatcttatgcacgattcttatcaacaccattttcaagacaaccatgaaggtgccttgaattgccccattcatacaaagtttaagaacagagagctctccaatacagggagaagtggggacagtagttgttggaggtcacagagagctcttgggctttatgacaccctgtctcttgactctgtcaggtttgtcgcctcgggtgaggaggagtcttgcgtctccttcccttacttttctctgagtacaatttgacttcggcaaagagtttactggaaagaacacgctcaggtttgcaaggttgaacagtcactgtgaacaggaagcgcgtgttctgtctgtgtttcgtttgtctgtgtgtgtggagatggaggctgatcttggggtctttgtcgtgctagacaagttcagctcgcatcaactgctgagctgcaggaccagccctaaaattttattcttttaagtgttgagagaaagtctcaagttactcaggccagtcttaaactcgatctacagcccaggcaggacttagccctgtgatcctcctgccagccgctgggatttcggtcctgtgcctagtacaaagagtattttatgctgtgtttagaaacctcggaaggcaaacattcatttactctgagcagataagaagaaagattgacaggaaagtaaacggttctcgaatggcttgtgtggacagtctgttgagtaccttgctagcttccttcaggggatgtcttgactttccttaaggccaccctgcttacttggaggccaggccacctcatggagctaaggatgcagacagcattgggcctctcagagtggctggctactgcctccatccctacctaacactgacactgcaaaggtgggaatgctctctgtactgtcatcaccacctccctccccagcactgcctgtcagctgatgattttgaactagtgcaagaacaaatgtgcttcagccaccagccctgaaaatggaaagttgtctgttctttatgcttccacttgggcttggacagggcaaacaggggccagactggagcagagggcttattcgaggggctgtggaccagcaagtgtgtagataggattccaaactgatcttgactgtgaaaacttttgaaagggaaagtccttaccaggcagtgttttcccctgacactaattttgtttgtcttctggttgaagataatgaattaccattaggaataaattggggcctcagtgtcttctctgctggctaaggtgtggggttaccttgcatgggaggagacagcgagcctcttattttcccttcccgtatttcccctttgcttgttcatttctccattttgtcattcccgatgtcttcagcccttggcctttctgcccattcctctctctttacacagtcatgtttatttaattttggatgttctcttctggccaagagttggcttggtgcacaccaaatggaaataaatgtgattaactctgttctagactcagagggactgaaatataagaagatcgatgccagatgttgttgtgatgacaacctgttgggttgaaggaccccaggaagacacagtccagattcacagggacagagccactcacctattgtcacatgcagcacagaataatgcagaggcatggcatcataacaattcctgaatggtgcttctcagaagatggtacttcttggggtctggtacctggactagtgaggcttctcaggggatgggaccccaacccagaatgacaacatcacctgataacttcatcttcatcattatcatcatcatcatcattgttgttattccttttgttttgttttgagattgtaataaaattatatcatttctccattgccctccctccctccaaaccctgtgatttacctctccttgctctctcaaattcatagcccctttccccccacaaattgctgttatacatatatacgtacatacacatatttctaaacacacaaaaacaacctgctcagcctggataatgttacttgtatgtatgttttcagacctgtccatttggcatcggctgaccagtcggtgtgcctctccctggggaagggttgttcttcctgctctttgctttctgtagttgcctgtagttctttgtgtagggttgaggtcttgtgggccaagatccaaaacttcactagccctgagtagttagccaggtttcgagtactggacaaagtttttctcttgttggggaaattctttgaaacacactttctctgggaccttcccagaatcgccaaatcacgcagtcagagagcagggcccatggctctattttaacaagatctgcatgcttgtgttgcgtgtgcaaacatttatcctcagtgtctagtgcttagacactgtttactgtggttaagtggcatggactgatagcatgaggatggcctgagaataggtgaataattggtcacaccagagagggaggggggagggggagagagggggaaggggaaggggagggggagagggaaagggaggtggggggaggaagaggaggaggagaaaagggatccaatccggacccctcacctcttaaggccccacttgggttaaacagtagccaggcacacaggacacagaagacagaggggacagagaaatagaaaagtgccaacactttaccaactgagttgccttctccttagcctaagaaaatattttaaaacaaaacaaaacaacccagccactttctaagtatacaaaaaactcaatgagtaacagtaaacataggttaataagtagtattaatattttctatggagatatcaggtctttgagaggtagctcagcttccgggttcacccattcactcattcagtccagcatgaagctggcatgggacgtccagcctggaaataagtaagtcttggatgagccaaaggctggagcaagagaggactcgctcccatcccaacaatgaagggatgcagggcagagtggtggaagggcagagatgctcccaaagacagggtaaagggagcctcaccccacattctgcccttagtttgggctggaaatgtccctagaagaacagagaaaccgaggagggatcatgagctagtcctcagcccatcgcccgtgctttgagctctctcttgacacagcaagcaagactgattatagacaaatgtccgttcttgctttctgcatccagggcctgagagatctcagacgcccatgcttgctcaggaagctgtttctgacattggcctgtttggtgaccagaaactgatgctgtttctccacgtggcctacagctggccagttggcagtggtacggctgagcctcagaatactgacaatggctgttttcatcccatgagcagattggtgtcaaggctggaaagaaagaaagatttttcactcaactcccactcttcccaaacaagccaacaagaaggcgaggtgtttggaggcctcccacaccctatacgtgaccctttttgtatttgctcaaggtggtagtaccacagttagaacctttggagtttttttggtatccttttagtctgtgttaatgtgtctctgctgtacttaaattctcttcaaaatgacctccacatcgatacatttcttggaattcacatgtgagtaagaaaagataagataggctggcaagatggttcagtggttaagagcgcggactgctcttccgaaggtcctgagttcaaatcccagcaaccacatggtggctcacaactatctgtaatgagatctgatgccctcttctggagtgtctgaagacagctacagtgtacttacattaaataaataaataaatctt

SEQ ID NO: 19 - DNA, 324447 bp, Mus musculus
agtgttcacaagaaagcatagaaccagatgtgattaattggatacaagtgatcgatacatgttcttacagcaattttcaagttaaaagtaccccctaaaactatagattaatatgaagcacaagtaaaactgtccaggaaggtaaatgtggatgctcttgaatgtcattccagctcttgggaaaggatgagacaaaaagattgccttgacttcaaggtcagctccgtctacatagcaagtttatccagactgcactgaaaagatggagactatctcacaaaataagtaagtaaaataacatttccaaggggaggggagacaaggggagaagggaagaaaagggaagggaaggtcttgcacgtgccctactcgaccagcgagcccagaactggtgctgcttatataggcctaggagaggcgtgtctcacacccggattggttatgcactaagcctcatttgcatgttcctcatctgattggctactctctctctctctgtacctcacagagcctcattatcatacctcatttgcatgtctcacatctgattggttatactcccaaagcctcattatcatgcctgggtcaggcagtgtctttgcaaaaaactttactgcatatgtacacattggttgtttgtccaaacttatgcgtggtggccagcagtagtcagtgccactctgcaacggcacatgtggcttcccacaggaagagaaggcaaaaatatcccagtgtggacgtagtggtgcacacctttaaccccagcactcaggaggcagaggcaagcctagatctgagagtctgagtcccagcctggcctacatagcatgttccagaacagtcagatctatatagtgagaccctgtctcaaaaaaaaaaaaaatcccagtgcttacatggaggatatctctctatgaattattggccagggagctcccagaggctgacagaacaatatagcctattgccattgttttgggttatccaccggagaactagacagtaagacctgattgctaaaggtatcacatactttatgtgcaggactcttaagagtcaaattggagcttagttgattagaggtgctggctgccagaggagaaaagatagtaacagtcttaaacatccgtagacactatgtgctataatactgaccagtcaggcaagatgtacccactggtacaatagtggcatggcttgttcagggggtaaccaaccactcctggttctgtctgaggtctgctccatggtagggtggtgctgtaaatctagtcaaaagcctatccctggccaggtccaaagtcataggtgagcatttactgttgatgcattgctaagtgggcatgtaatagaatagctctctaagtagggatgcttatttctataaactagcactgctctcagcctagaccagggaagcttgattttacagagggtgacagtcagtgaagagacaatgctagaaaactacatcatagtaaactggattcttgtatccagtccttccctgtgctctgcctctgctaacagagactttcacctaagtactaggtacttatgaactagatggtgggtgtcacccctggcaggtgcttgctaagatgggcaggtggatgaactacctgagaaagactttacagagaaaaatgagtctgagatgggaaagtagcatgcatacactattaattaatagttcttatataattaattatgaattaacgatggacttttataattccaatcaataaatataatccactctccttttatttttttgatcaaaattttatttacttacttagtccacagcccatattcaagtcaaatcaggacacagtgttaaatacagcttctataaaaacattcttctcagggctttgagaacagcttatcaggaaaagtactttccatgcaagcgtgagaaccagagtttgtatctctagaacccatgaaaaacttagtcaggcatggcagactttctataattgagccacctggaagttagagacagaggcctagcaggatggctagaaagatttataaaaacaatgtgctccaggtgcagtgaaagacttagcttcataacaaagaagatatttgatgttaaccttgggcttccacatacatgcatacaaacatgtatttaatagcccatatttgcatatatgcatgcacatatacatgcatgcacagcacacacacatacaaatggtgaaactaactaactaaataaatgaaattcttctcttattatttacaaaacagccaagaataaattaacaatcaaattttaatatattaaaaagggtggtctttcaaaggtttatgtggtgtttcaggtcttagtttcagaactaagaaattacttttacaagattctaatgtcaaaaaaaaagtggtattataataaatacctggatgttggtttttgatgagatttaatccactctcctttaagtagctttagctagggtattttatcacatcaataggtacacatcaaaaggaagacagtgataatgacactggtaattcttacagtttcccattgacttctggtactcttgtgcttgcacatgctcgcagaagcactctttcatagaagttgctttaggatctctgtcagatagttctgatcccaccgtcctatcacctctgctatctgctgatgctcctcctgcgaaaggggcataaatgactcattctttctcttcacttgaaaagctgggggagggggagggcactgatgttatcgccacggggctctggtgaaggtctcgacttcccactcagcctttttgctatgaaccatcgtggtgatccacacttcccacacggtctccagtggcaccttgcaagggcaaaggggcttcatgctgcttggaatatggaagacgcttcccattcagcttccttttcacagagggttagggtgacgcctggtagccgtgagtctgggctccccactcagagcctttgctggtgtgggtagcaactagaccacagcttcttgatggcatttggcagaagtggtgtgactgcggttcctttgtctttctaggctgtcttctcctggtcctgtggctgtggggaagcagtctttcgtgagctatctttgtgttctaatttcatttctgtggctgtcataaaataccctgacacccccgcccccccccaaaaaaaggtaacttaagtgagactttatttgacttgaaatcccaactaacagtccagtctatcactgcagagaaatcaaggtaggaactcaaggcagctggtcttgccatatctaagagcagagagaaaataaatgcatgcttgctcaattgctttctagtgctcagcttgatttatccattcttatacagttcagaactccctgcctagggaatggcactacccacagtggtcggggtctccccacatcaattaacctaagacagcccttcgccaacaagcccacaggcaaaagtagtgcagacaatccttttgttgaactctcagcccaggtgattctaggttgtgtcaagtttgactgttaagctaaccactgtagtgtccattggtgcctccaggttgctagcttctccagctccagatctgggtcatggaaggtgaaaagtgaactcagaacttcttcttgttctgtgacttgggttctaagttaagtgttgtgtgcttttcaactaacagtgatagattccacccacggacacaatgaattttacaaacatgacaaagatccaaaaacaataaagccatcactgaaggggctgtatactacataccagccaccagttatagcagttttacaaccgactggctcctgtgagctaatctggccttaagaactcccattataatgagataagcatctgaatctgttactcaacgtagctactatttccacaccaactgatttctaccaagaaatctccccttgcgagttattaaaggagcacacccggtgaattcagaaaggacacaattgccacatttgagtcacagggaggtgggtggaggcaggaggagtgattctgtaaaaatggctggaataggtgggagaaggtaggagttgctgaaaaggtgaaagagaagaactgtcagatctaagaatcctctgcctactagggggagatggcccgggtaatggtttcaaggtggtgggacacagaggaacaagggcaagaggatgctatgggaggatagaaaagtgcgatagagatgtgagaggtggcgtctcagctgattgtgggggactatggggtggagagaccagcatgcacagacaccaatgctaccagaggaggacgtgcactgtgcctgccagaagcctcagctggctgtacggatggataaaagatgtgatgtcatgaagtgattgaaaataaccgtgagagggttttaaagacaaaatgacccctccccctttttgagtgaaaatgctctttaggttttgttctgtaaaacaataaggcaggactaggggatttaaaacctacatgggaacatatctctgggaaggtgttttcagcaaggcttaactgaggagggaatagccatcctgagtgtgggtgtcaacatcccatggcctggaataaataaaataaaaaggaggaagggggctgagcacagtgatcatttcttccctccctgactgcagaatgtgaccagctgtataatgctcccctcccccattgtcatgcctcccacaccatgagctgactgtgttccttcttagactgtgaataaaagcaacccctcccgtctttcacttgccgttgacagccattttctcacagtaatgagaagggagctaatgtagagtccgtgctttgaggtctccacctgggtcagtgtgggagcaccccagtccgtcatcatccattcagaggaaactggaaagtgcagctctattagttatgtttttatacagatctttcccgggtgtggggctctttgggaaaccttgctcatcctcacatagttggagtgatttgttcagagatgtctttcagagacctgctatggattcagctgagtaggtgggttctctatgggcatccaaagtggcccatatgtagtctgtactgccccagatcaaactaatgccaaatagggattactcagttcaaagccagtccgtttcattgtggattcagtgtgttcagagctaggacagaactcaccttccatggggaaggagcagcctctgtttcttttcctcttttctgctaagctagacagcaataaaaatgatagccagtgtcctagatactggcagcattatagataatcatacatgcatattctctttgataaccctagcagtaagtgcattatgcacacttaaggggtggataaactgagacccagaaaggtaaaaaacaaacaaaacaaagaaacttgcctaaatttgtagactgattctcgaatcatgagctgagccctggaattcatctctctctgtgctctgactacagagatggcagagaatgtgaccaggtgcttcatgctccaactgcctgctttccttccaacagtgagctgcacccctgcaaagcctcgtagaccagttgatttgcctgcccacaatagttccagaaaacaaaaatccttttaatcatgtgtacgcgtatgctcacgtgaatgtgggttggtgcacaagtatgctgcttgcagaggccagatgtgagccttagggaatgctgagctccacagctggctgcaagggacatgggctagatttgcttatagggaactgcaggtcttttccttgggagcagtccgggtatttactggaggtgagactttggcctgtagaagacagagaagcaatctgtgctgcctctgtggaagaggtctgctttccccctcaggtgtgagttgtggatgttagcctcccagtgtgggtgctgggaactgaaccctagcccacgaaggggttaggagacacgaggaaaagccaccatgtgccctttaccagtgtgccacattttgtcccagagccacattcctgtttttaagtagaccatcacagaccagacctcttctggagagacaccccatctccagagaaaaaaaccaacaaaagatcgccgagttaccacgtgtgtgaagacattttggcagggtgtaggggaagagatgaactagctgtggaaggaaggctgggctctctctgtctttgacatgttgaggtgaggcctcagcagggtagggaggccccactgcctggagaatctctcccaggacactttagacccatcctgagcatcttctggagggagggcagccgatcccttccatggaggcagcacagattgcttctctgtcttctacaggccaaagtcatcccctgttctcgctcagctataaaatgccccaaatgttcccaaggaaaaaacctgccattccctataagcaaatctagccgtgtctcttgcagcaagctgtggggatcagcattccctaacagatccacagatgttttctctggctcctcctggtatcccaactccagggtttgggacctccttgggaaagctgctgtttgctgtaacctcttagaggtattctatgtgtctcaggggccaagaccacattcagaactctgtatcttggctcttagtctgagagtcatgttgcagcagcctctcttgggcttttagaagccagtctagggaagagggaagctggggatgccaagggactgagaaagacatgctcctggaactgtcaggactctgttttgaattctgaccgtggatgatgctggtgggtgattgcatgaaagccaagctcccgggtaccaggagaactgcacagtattctagaatcttctgacctaagagtttcaactggcttcccagggctgaaggtggaagagctaccaacagtagtggtcatgataagaccaagctgaggtttgaatcggtggtcgtctggctagcctctgttccacactgcaatgccacagttggggtgcaaatgagcttcccacagggctgatagctctgtctgtggtggaggtgaggcaagcagagagaccctgttcctgctctgaaagggaacatgtgttcatgacatggccagcttacttattcattgtttgcagttagacactgagattgcttccggttgttagctatcataagcaaggctgcaaaaaacattgatatcccagccatttctaagttgatgtctccctgttacagttatatgtcttgtgtgtgtatgtatgtgtgtgtgtttgtgtgtgtgtatgtgtgtgtgtgtgtgtatgtctgtgtgtgtgtgtgtgtgtgtgtgtgtgtgtgtgtgtgtgtgtacatgcacctggagactggaagttgatgttggatgtcttcctcaatcattcttcactttatacatgagatggtctcgtgctgagcctggagctaaccaatttgtctagactacctggatagcaagcttcaggagttctgtctctgactccccagcactgagattacaagtgtgtgcttggcgcctctcccacacccacgggttctgagactcaaacacaagtccctttgcttgcctaggtatgaaattaccaacaaagccatctccacaacctcagctattcagctttaagtgtaatacctgttgctcagttgctccctatagtggttctgatggcttcccatcctcctgtggtcttcccatcatccctccacattgctcatcattctttcagaggtaagttttcagttgtaagttatgaccttttaatcactgatttatgcttcccaaacattctgcgtgggtggatgtgtgtgttggggcaaagaaaaatggttttccaaagaacattctcaatacaatctcttctgctgccccagtctataatttcagttcttgggtatacaggcagatgtatgcaggatataaagaaactttgaatttggggaaagaagaaaaggccaagcaggaagaagaaaaggccaaacaggatggtgagagtttaggagcagtggcatataactatagtcccataactcaggaggctggggattacaagcttgagtctgagggtggacagtgtgtttaacaccagtttgggctatagagcaacctgggagacaggtaggaaagaaagaagggagaggagggcaagggaggggaggggaagcaagagggagagggaaattgagagagagagagagactttacaagaaaaatgagaggtttataatatagtgattgtacctactcaccatagagttgaacctccaagactgagctatttgtaaaaaccttttgtctttacaagttgattatgtcaggtattttgttgcagtgtcagaaagctggctaccgaaaagtctttcaggttatcactgcctgcccagattcacagatgaggcttcagattatgagactaggccctgagatcttaggtatatacatcataatgaaccgtagatcacagggtgtagggacaacccacagatattgtattttcttgctatgaaaaaccgtgtccttgtgtttttagttgttaattggacctggcagcaccaggctagtgggatgtgtaaatgtcacttcctcagctgcctttaaaagaaaggcaagctgccctggtttcccaaagcccctaaagccaactggttgagtaaggaaggtggctttttgcataataaagaactggcagttggagctggggcaagaagtagaggaagtagtgcagaatgtctgggccagttggcccatgcaggcagatgcagagggagatgagtccggaaggtgctgggaagtagactgtgagaaccacatggagagccacaatgtcagagaagtcgggttaagttagaggctatctgagagaccgccccagcctaaaactgtacagatgtctcgatgtgtttattaaacctcaactgggatcccaagaaggcttctcagtaacagcatctagtttagagtcagcagtgattaacagcagaaacatgtatgaagtgtatgtattctaatcagtgtcctggcctgcctctaccgtaggaaacaccaggcagagtgctgcagctcccggggtcctgggacaatgccctgaaacacagtaggtctcaggataggctatccccaattgggcaacctaacatctggtaactgtcatttcttgttgtcttggttcactttctgcctagattgtcttaatctcatcatggtcataagtgtcccctctaaaatccccattaaattaccaccctttctccaggcactggccccacacagtgtcctgccattcccctggttgcctttcttcttcgtggggtcgggtggatagctctctcacctatgccctggcccctacccaggtctatctccctgtagaagggaaaagtggcttcctgagtggcctggcctctgtgctgttgggaatccatggttagcacaacttctcactccagagacttgtgtgtcttacgtgttgacaagtacagtcacagaggcaaacacagctactccccagttcccggagcagtaagctgcttagtacttagagccaagctttattgagttctctagacccagggccaatatgtagcatggtaggggctggattgtgtgcctctagaatatgtgttaactcaaccttgttatctcatgatgtcttgcaattgggaggcagagtcttcacagagataatcacgtaataaggaggggggtgaatatgataagcaccctcataaaaaggagaatttggaccattttgtggggacaaagcctgagatgagggtgacttattaatgggactaggaataccaagaagtgccagcaggcaagacacagaagccaggagggagcatggtcagcttgttcttacagtctccgggaggaatgaaccttgttgacacccggggctttgatatctgtctcttagaactgtgggaaaataaatagatgttgtttaagccatttggctatagcatgggccacagtatgagtgaacagttaaatgcgttttctgtgcctttggcccgggtttctccctctgtacctgcagtccacagctttgttcttatcacagagtctcagatattcccgatgttgttttctttttagatttaacgcttcctttgaccaaactctccattctttctgtcttgtcttcaagacctgaaattccttcttccttgtcttttaatcagttgttgatgtttatctctgaggtttttgttggacatcctcagtgtttttcatttccagctgtatttcagttcaggttgtttttgttttgttttgtttttgttcttgttgttgttgtttagtgattctatttctttgtaaaatcccacctttgtgccttgaagtgctctcattatttcgtctagctgtttgtgttttcatggtcttcattaaggcatgctctctttcaagtcttgaacacatatgtaattgctattttgaagcccttgtcttgcttgtgattcaactaagttgcttctcccagggcctactttcagagacatgctgccttctggaggagacacattgggtagattggccatttttgtgttttaatcccatcctcctgtggtcttcccatcatccctccacattgctggagtgaagttgatagagatgtttcttggtgcggatatctggtcccatctttcctgggtggatactcattctttacttgctctcgcccactctgggtcctcagctgatgtggtagctgtggagtctctgagtccgagcccagcgaggccactgggggtctctgttagagagtgattctgcaggtagcatgtgtcaccaaggagtctgaatatttcttagacttctatcacagcagagaaacacgcataactcccattgacaaggggaacttctgttattcccgtgtggaaaggcataaatctgggcgagctggcttcttcactgactttctggggtctactatcttctcaagtggatttcccttcctctgcctcatgagctgcaaaagtacttaagctgcaatgtgttcttcaggtcccaaagccggagccacgcagctcactcccactgtgcctgaactgtgcagagttctgggtaaagtgacatgtttaaaggtcgccgtaaatgctggcagctgaagggagaggataaatctgagccatgtctcgtggtcagtgggtcagtgggtcagtaataaaagacatgaacttgaaatatatttcctcctgcctttcatggctataaagatcaataaatttttacaaagtttcaagataaagtgtgagacatcttgggttttatgtgaatggcttgcatgaggacagtgcccatgtcctggcccttggagcaggagatgatttactgttgatggtttcttggcatactcaatatgtacttgggggggcaatattttaaaatcacccagcacacagtctctgataagatgcatgccttaggtacttggacttgttttataggagagatgaggcacgtgctccatgctgttatgatctgggcatggtgttcttccacagaggagttgaagggatggaaacctggcttctgacagggaatcataaagcatgcctgtgagaaatggatgcggggcttcagagttcacggttgtcccaggtctcggtgcatatttatgtctgtctaggcggtgggggggggggtggacaggcaggggaggggaccagtggggaggactcctttcaagagaaagccctgtgagatgtgactactactctgatggacttctgtcttccccagacattagccaagcctgagggctttctgtccactgcttcacctgagaaggctaggaagaaaaggagagtcgcttttatagccagtgtctgctcactgtggagacctgtgtgcttgtggactcgagtgctgaccaggagaaagggacagtgattagactcaacatggatcactgcctacttggttcttggaagcagcaaacatgtggctcatgccccccctttcccctctctctctctccctccctccctccctccctacttccctccctccctctccctctgtctctcagggaacccagctgaagagcaggcagaatgtaagagccagaggaatggaggacaccaggagatcaatcagctgaaccaagctcatgtgagttcatagagactgaagcagcaagcacagcgtctgctcgggtctgcaccaggtcctctgtgtatgtattgtagctattatcttagtgcttttatggaaatcccaattataagaatgagtaggtctctgactcttttacctgctcttaaggctcttttcctcttgctgggttgccatgttgggttgatatgatagattttgcttcatcttattgtattttattttgtcatgtttggttgtgatctcttagaagcctattcatttctaatgagagacagaaagggagtggatctggaggagaagggaagggaggggaggggaggggaggggaggggaggggaggagaggggaggggagaggaggggaagaagaaagtgggaggggtagaagaaggagaaaatgtaatcaggttatattatatgagaaaataatctattttcaataaaagaaaaaattcaaaaaaaaaaaaaaaacttccataggctagcgggagagccgaataaggaaccttctggttaacacatttgatgagcatagtgaacgtattatttgtaaatagaactcagtaagcccaagcatccacctcctctgtgttctggccatcctcctaactccacccggctcagctcaagtgcatctaccctgttagttgagtcctgggtaggttataacttggaagaactctaagttagaattaaagtcaattttaaccaatctgtcatcttatggatctataacttaaagtgctgtatggttttaagtgtccttgtcaaattttccatggttgtacacaagaggtttgaaactgaatctaattctattccctctagaaacatgtttcatgtgtaaaagttaatactgctgaatatagactctgtttttctttaattgactttggcatgaaattagcatcttgttaggagctaataggcatcttcattatacataaaactaacatattataatgatagttctgagaacgtatctaatacctcagaaggtaggaattgtgggaaagaatcatcatttcccatgtgtttttgctgttataccagtgacagtagaaacctaacactttcctgagagagaaagagaggggagggtgctgtgtgaccagcctttttccttgtctccttgtgtctgtgtttatgtgcctgtacccccttggtgaggggttctggtggctttgccctccacttctattctagtctgtgtggactacagctttcccccataggcagcatctagcaccatgcagccctcaaaccttcctggtagctttggcttcccagtcaagtgtccttcctcctgttcttccttccttctccagtgcagcccttcatgggatggcactttcaaatccattatgcagtaagtgcatcatccccaggtcacctgtggaatcaggaaactggctttcatcatactaacccacccttcaaagtcttttatgcaaacacgcaaacacaaacatgtagaaatacactccgtttccccactttcagacaagaagaagcaaaccatctgtgccttgcttttctaacatattctctgcctctgacagattcccctatctacactgaaagcacccctacacttctacatagctggcttcgtggccctctgcgacaactcctggctaacacaccctgcagttatgaacctcgcaggatggcctcagatggagtcttatcttccacacaggcagacacgtacagacagattctctggagagaaactgctggacaagcggcaaatgcctttagaattctagcacacattaccaaattacattccatagagttctgctaactgctgggcagtatcatgagcatgaaattggaagtccttcctcttccagctttcccaacagtctatcttagtgacatttgggatttctgcagtgatgttctggtgtcaaacaaccacttctcattgtattagtatttctcactgatttattgtgtctggtgattttcatggagtaaatacgctatttcttcccagcccaattgtaacttcagatatgcccatgcctgctccctgcacgtgaagttgaaatgaacatcagccatcattgtatagtgtcacctgacacatggagacaaaaacagcacaggaataatgggataataatgacgaatctaagagtcttattactttatcagtaggctttatgtaaataatgtctatatggttaacattttagtaatgatggactttaacaatcaacttgtacaaccagctcctgaaaagctaatggctgctccttttgagctggccagagccaccctcaggtagcagtgcagcttggatgagttgaaggcagcaaggctcacacagcgtccatctttactctggttgccttttgtcttaggaccatcgtattgctgtgctgtgaagtctttgctcatcctttgcacaaaagactcttgggtttgctctaattcaccctagcaagcaaaccctagcgagcaaaccctaagcaaagaccttttattgatcttgggtctgtgccatgggctataatcttttattttagctcagtatttatctttggtatttaccaatgggttttgtttttgtttttgtttttgttttgccatgaagttgtcttattattgtttaaaagataattattttaaattatgtgtgtatatatgtgtctgtgtatggctatgtatatatgagtgtagatacttaggggggcagaagacagcatccatggagctagagtttcgggtgggtgtaagccaccagatgtgagtgctgggaaccaaactcaagggttcaattatgtgattaatacataattaaatacacataagagtagtatgtattgtgaatcactgagccatctttctagcctggttattgctggggattttgtctatttgttttggtagttgcattttccacctttgacagcttccaaatgttgaataataattaaaaacccacagggtcacataataaaagatgtcctagtcttcattacgtatcaaatttaaatttccagttccttttactttgagcaacctgacaattcctgcctccccttggagttccgtgcatgttggaaattcttccttttttttgttctaactcaggtcatttttttaaacctgtggcatttagtgatactatgagaatagataatatggtttttcacataacaggaagtgcacacagggaccatcaacatttatcaagtgttagatctttagagcaatggttaaatggggctcagacccacctcttttctatgacttgcagtattgtccacatgggggatttatgtaattttcttctcgattgggtaaatactggcttaaaggcaaattgcattttcctttgactattccaaagctcaagactctgagcattgtcctgagtgtcactgggacaccagcttcaaagatgtgtttcccttccgcacgttttcatgtgacttctcatctcataacatttactcggtacccaactagttttagggcctgtgacatgtgtggtttttatagtgtgatctcagaatccagtcacatggattgtcctgatgcagagcatctgagacttgtgtaattcatagcaaactttttatttttggcatctcattttctgtctcaacttgagaaaacaggaaacagaatctcagctatggtaagtgatttgcccaaagtcaccctgtagccattctggcttctgcctagcacatctggcatggtgtagtggctattcctggttgtcaacttgacaatatttggaatgaactacaatccggaattggaaggctcaccagtgacccttatctggaggcttggagatccttatctggatcttggtttgaagatcttgagccatagtggctatggattccagaagattgaatctccgagtttaaggaacacacctttaatctgggctacgcctttcatctgggattaaaggtgtggtggaacacacctttaatctgggctccaccttctgctggaaacaatataaggacattggaagaagggagtctagctcttgctcctgctccttcgcctgcttgctgcgtgagactgagtaactgctagatccttggacttccattcacagctgtgactgaacgattgttgggaattgagctgccgactgtaagtcatcaataaattcctttactatttagagattatccataagttctgtgactctagagaaccctgactaatacagaagttggtaccaggagtggttctagagtaacagaagtacaaggatgaatcttttaaaatactggaattggcttgttgatccaccagcactttcaaatattgaaacctctccagattctctccctcctgggagctcagagaattttgaagacccatggttgaaactatattccgaacttaaagaagctaatgcccttgattttcttaatgaattaggtgattcagtgcacaaagctttctacaagatggggaaaaaatcgaaaaatgattttacaggctggctgctcttagtatctgtggaaaaaatgatgaatgaaaggaaggagttgtgtgataaaatcgaaaggctccagacacaagtaaacgatctaaaagttgctaagtgtgtccttgaggagaatcttctctcttgtagcaatagagctcaagttgcagaaaatcaaacagaaactctcattgtaaggttggctgaactacagcgaaaattcaagtctcagcctcagagtgtgtcgacagttaaagtaagggctctaattggcaaagaatgggatcctacaacatgggatggggatgtgtgggaagaccatgttgaagctgagaattttgaatcctcagattctcaagggtttgccccacctgaggaagtagtaccctcagccccacctcttgaaataatgccttccccacatgaggaaattaattttgcagagtctgctcatggcccaccaatagtttcttctagacctgtaaccagactcaaagcaaaacaggctcctagaggggaggtagaaagtgtagtccatgaggaaattcgctacactactaaggagcttaatgagtttgctaattcattcaagcagaaacctggtgaatatgtgtgggaatggattttaagggtgtgggataagggtggaaggaacataaaactagagcaggctgagtttattgacatgggtcctctgagtagagattctaggtttaatacggaagctcgcatagttaaaaaaggtgtcaaaagtttgtttgaatggttggctgaggtgtttatcaaaagatggcctactggaaatgacttggagatgcctgatattccatggcttagtgttgatgaagggattttaagacttagggaaattgcaatgctagagtggatatattgtgtaaagcataattgtccacaatgggaaggtccagaagatatgcctttcaccagctctataagacgcaaattggtgagaggggcaccagcacatttgaagggttttgttctttcccttttccttgtgccagatcttagcattggagatgcttctgctcaattagatgaattaaattcactgggtttagttggattccgaggtaacaagggccaggtggcagcattgaatcgcccgagacaaggtgattctagttattataatggacagcgtagacaaaagaatgtttataataacatacccagtaatggtcagcacaggagaggtgaaatttataatggcatgactcggttggacctttggtactggctaaccaatcatggtgtttccaggaatgaaatacataggaagcctactgcatatttgtttgatctgtataagcagaaaaattctcaaacaaatgaaagaaaggctacattagatcgtggtaaacagccaaatgaaagaaaggctacattagatcgtggtaaacagcaatctcggccagtgaatcaatttccagacttgagacagtttgcagatccagaaccccttgaatgaaggggtggccaggttccgctgaggaaggatcttgataagacacccaaaggttttgctgttaccctttctccagttcttccccagagggacctacggccttttacaagggtaactgtacactggggaaaaggaaataatcagacttttcggggtctgctggatactggttctgagttgacactgatcccaggggatcccaagaaacattgtggccctccagttaaagtaggggcttatggagggcaggtgattaatggagttttgactgatgtccgactcacagtaggtccagtaggtccccggacacatcctgtggtgatttccccagttccagaatgtataattgggatagatatactcagaaattggcagaattctcatattggttccctgaactgtagagtgagggctattatggtgggaaaggccaaatggaagcctttagagttgcctctgccaaagaaaatagtgaatcaaaaacagtatcgtattcctggaggaattgcagaaattactgccactatcaaggacttgaaagatgcaggggtggtggtttccaccacatctccatttaactctcctatctggccagtgcagaaaacagatggatcatggagaatgacagttgattatcgaaaactaaatcaggtagtaactccaattgcagctgctgtaccagatgtagtttcgttacttgagcaaattaacacatctcctggcacctggtatgcggctattgatctggcaaatgccttcttctcagtacctgtccataaggaccaccagaagcaatttgctttcagttggcaaggccaacagtataccttcacagttttgcctcaaggatatattaactctcctgccctgtgtcataatttagttagaagggatcttgatcgtttggatcttccacaaaatatcacattggtgcactatattgatgacattatgctgattggaccaagtgagcaggaagtagcaaccactttgggctcattggtaacacatatgcgtatcagaggatgggaaataaatccaaccaaaattcaaggaccatctacctcagtgaaattcttaggagtccagtggtgtggggcatgcagagatattccttctaaggtgaaagataagttattgcacctggcccctcctacaaccaagaaagaagcacaacgtttagtgggtctatttggattctggagacaacacatccctcacttgggtgtgttacttaggcctatttaccaagtgactcggaaagctgctagctttgtgtggggcctggaacaggagaaggcccttcaacaggtccaggctgctgtgcaggctgctctaccacttggaccatatgacccagcagacccgatggtacttgaggtgtctgtggctgatagagatgctgtttggagcctctggcaggcccctgtaggtgaatcacagaaaagacctttgggattttggagcaaagctctaccatcatctgcagacaactattctccctttgaaaaacagctcttggcctgctattgggccttagtggaaactgaacgtttgacaataggacaccaagttactatgcgacctgaactacccatcatgagctgggtactatcagaccctgcaagtcataaagtgggacgcgcacagcagcagtctattatcaaatggaagtggtatatacgtgatcgggccagagcaggtcctgaaggcacaagcaagttacatgaagaagttgctcaaatgcctatggtttctactcctgttacaatgccatctgctgccaagcatgcgcctatagcctcatggggtgttccctatgatcaactgactgaagaggagaagactagagcctggtttactgatggctctgcacgttatgcaggcaccacccagaagtggacagctgcagcattacaacccctttctgggacaaccttgaaagacacaggtgaagggaaatcttcacagtgggcagaacttcgggcagtacacatggtattacagtttgtttgcaagaagaaatggccagatgtacgattattcactgactcatgggctgtagccaatggattggctggatggtcagggacttggaaagatcacaattggaaaattggtgagaaagacatctggggaagaagtatgtggatagatctctccaaatgggcaaaggatgtgaagatatttgtgtcccatgtaaatgctcaccaaaaggtgacttcagccgaggaggagttcaataatcaagtggataagatgacccgttctgtggacagtcagcctctctccccagccatccctgtcattgctcaatgggcacatgaacaaagtggccatggtggtcgagatggaggttatgcttgggctcagcaacacgggcttccactcaccaaagctgacctggctacagctgctgctgattgccagatctgccaacagcagaatccaacactgagccccagatacggcaccattcctcgaggtgaccagccagcaacctggtggcaggttgactacattggaccacttccttcgtggaaaggacagcgttttgttcttactggagtagatacttattctggttatggatttgcctttcctgcacgtaatgcctctgccaaaaccaccattcacggattgacagaatgcctcatctatcgtcatggtattccacacagtattgcttctgaccaaggaactcatttcacagccagagaagtacgacagtgggcttacgatcatggaattcactggtcttaccacattccccatcatcctgaagcagctggtctgatagaaagatggaatggccttttgaagacgcagttacagcgccaattaggtggtaacagcttggaaggctggggcagagttcttcagaaggcagtatatgctttgaatcagcgctcgatatatggtacagtttcacccatagccaggattcatgggtccaggaatcaaggggtggaaaatggaatagttccacttactatcactcctagtgaccctctaggaaaatttttgcttcctgtccccataactctaggttctgctggcctagaagttttggctccagagaggggagtactcctaccaggagctacaacaaacattccattgaactggaagctcagacttccccctggtcattttgggcttctaatgcccttaaaccaacaggctaaaaaaggaataacagtgttaggaggggtgatagatccagattaccatggggaaattggattacctcttcacaatggtggtaagcaagattatgtctggagtgtaggagatcccttagggcgtctcttagtactaccatgtcctgtgattaaagtcaatgggaaactacaacatcctaatccaagcaggatgacaaaggacacagacccatcaggaatgaaggtatgggtcaatcctccaggaaaagagccaagacctgctgaggtgctggctgaaggtgaaggaaatacagaatgggtagtagaggaaggtagttataaataccaattaaggccacgtaaccagttgcagaaacgaggattataaagtaatatgaatgcccattgtaaatttactaatgtgtttgcgattgtacgagggatagttatatcatgttaggcgtatttacaaccttgttattgtttcatgtgaacatgagatattatttgtgtcaagttgacaaggggtggattgtagtggctattcctggttgtcaacttgacaatatttggaatgaactacaatccggaattggaaggctcaccagtgacccttatctggaggcttggagatccttatctggatcttggtttgaagatcttgagccatagtggctatggattccagaagattgaatctccgagtttaaggaacacacctttaatctgggctacgcctttcatctgggattaaaggtgtggtggaacacacctttaatctgggctccaccttctgctggaaacaatataaggacattggaagaagggagtctagctcttgctcctgctccttcgcctgcttgctgcgtgagactgagtaactgctagatccttggacttccattcacagctgtgactgaacgattgttgggaattgagctgccgactgtaagtcatcaataaattcctttactatttagagattatccataagttctgtgactctagagaaccctgactaatacacatggcaaatccttaaataagatgaagaacttttggaccagaatggttttcccagctcccaatgcaggggtcatgtcactgtcccacaccaggaatgacctggaacagggtcactgtggggcagtgctctagtggtgtggtcatgagaggtaggggccacttacgtcaccgctctgtgcctgtggtggcacagcaagtggcagatgtggaggacattttatacaggtgacacactgtgcatccagccctgtcctagccttgtatgatgtgaccagtgtgatgagaactgaggcacaaagaggtgccaccattgctctaatgtgacagaggccatggttgctccaggtagcagttcaggtctatctcttgactaagtaatatagcacctcagactgggcaggtttataaagagtttatcctgcctcgtcattctgagggtccaaaatacaaggacctctcctggtgatagcttctttgctggcggtatgatacaggccatatgacatgagatgaccagctccagcttgtatgtgcttcctgatctcctcttcttctctgtaagccatcaggatttgatcatgggccttgctcggatacccttatctgacccagtcacctcccaggaccctacctgccaactccctaatcacattgtttccatgctcctcagaatatggaatggattctcacacttcgtttgagaggaggcaacccgtatggaaccccaacagtttgtaatgtctttaatgacctcaaaactcagaatctccagagtatcacagtttcacaatttttaggcacgagagactgcactggacaataaggcagagactgagaggaaggcacttgctgtcctgcagtgtcctctgcatgcatgcatgcatcactttgcatacacttaaaacaaacaagcaaaactccacatgctacagagcaccacctgccaaccattatcattgtattttgtacattagaccctagggccatgacactggctattatttacagtgctgaagactgaactctggccctgtcacatgctaggctagcactacaccatggagctctagtcccggtccttattatatttctgtttaagacaggatctcactaattgctcaggatgtccttgaacttgttctgtagcgttgacaggccatgaacctgtaatctgtcttagtctcctgagtagctgagattacaggttgtgatttgaatgaagaatgtcccctacaggcttgatatttaaaaacttggtctccagttggtggtgttcgagggagatttaggaggtctggccttgctggaggaagtatgtcactgggggttgcctttaagaatttatagcctcaccctgcttccagtttgctctctctgcttcatgctttctgtctaagatgttccctcagcttcctgctagggctctcggttgttctgccttctctagcattatggactcttatgcttctggaaccataagcccacagtaaaatattcttcccctaagtagcccttggccatcatattttatcacagtgacagattggtgccaccaagtttgatagtttttattactgagccattaataaagtgccattttcatttaacttgtcattgatatggtatatgataccctttggcccaatctctccctatctcaaacacatatctctttattccccttccttttgtttggattcaaatgagcatgcttctttttttttcccattttttattaggtatttagctcatttacatttccaatgctataccaaaagtcccccatagccacccactcccactcccctacccacccactccccctttttggccctggcgttcccctgtactggggcatataaagtttgcgtgtccaatgggcctctctttccagtgatggccgactaggccatcttttgatacatatgcagctagagtcaagagctctggggtactggttagttcataatgttgttccacctatagggttgcagatccctttagctccttgggtactttctctagctcctccattgggagccctgtgatccatccattagctgactgtgagcatccacttctgtgtttgctaggccccggcatagtctcacaagagacagctacatctgggtcctttcgataaaatcttgctagtgtatgcaatggtgtcagcgtttggatgctgattatggggtagatccctggatatggcagtctctacatggtccatcctttcatctcagatgagcatgcttcttttccatctctggtggtagaatgtcttcacttctttcatgcaagggccaccatagctgggagagtaaccatatagacttgtctgtcttttggcttttcgtaagaccacttccaagtctggctagaaaagcagagagcatacataatgttccttggaagtgggtgtcgttactaaggatactgccatcatttcctatcaagcagctgaaagtttctctgttttctcctgagcttggaccttccttttgagcatcccatccttggtttcatccttttgtctgtcatagactaatttgggagatgggcacagtccagactttacaagggagataactcagaattttccccaaatcaacagacttgttcctggatgttggagacccataccttttgtctctgttccttacctttacaaactctcttacagggtttcccagctctcctctgtgtcctgggctcatttgttcctttccttgttgctgcagccaacttctcgagaagaagcaacttaagggagaaagggtttgttctgcttttataggttaaggtatgcactgtaacctggctgagaaggctcagaggcaggaggtgcctggctacattgttatctacagtcagcaaggagaggggtgaatgctggcactcagctcactttctcctttttatttagtcttagaacctaggcttactgaacggccccacccacattcagggtgcatttttctactcagacttttctgaaagtactttcatagacacacccagagctatgctttcatggcaagtctaaatccaggcgagttgacagggaaagtgaaacttaaccatcaccctggggttcacaatgaaggtctgtccaatgggctggccatgtatgttaaatagtgaaaggcttgtcttagcagctactttgagcacacaaaagtaaaagaaattatcagatggtgtgtgtgtttgtgggagtatgtgtgtgcatatgcacatgtgcatatatgttcagctgcccaggaaggccagaaaaggagggcattggatctgttagagctagagttgtacattaactctgtgagctacccaatatggatgctcggatctaacatcaggttttctggaagaacagcattcattcttagtcactgagccattcttccagtcccacacagaccgtttttgatctttatgtcatatcagaagatatgaaacaaacagtaaaatggtctcacaggattgctacattttaaaagttcaatttttaaattttatttatttgtttatttatttatttgacgtggaaacttctggtttgtttggaaagtcagtaatgtcaaatgatggtttcctggggcacacaggtgaaaggatatcttgccaaagcagacacatgaaaggatgttttcctgaagcagacacaggtgaaaggatgttttgctggagcagataggtgaaaagacccggaatgaagaaatataaatataaccccacagacaatgtgagtgggagcattggtttggtttgctctatctcactattctttgctaatgatgcgcatgtattggttcgacttacatagtgttgttgagctccacttgtggtaatgctgtcactgagagaaactcgccaaacaacatcttgagaggttcctacagcttcttggccacttccatggtggcccagcctcaggctgattggagagccttgtggtttcttcaggattgaattgtagctgctggttcatgagtgatgtctgcctgcctagaagactgggctgtagctgttgattcatacttggtgtttgctatgggattgaactgctgccaaagaagattgagtttgcccacaaacaactattattgctgaacaggtccatttcccccatatcctaataacttttctcttccactacctctgctgggtggtgggcaagaggagaggttgaacatttattaaaagtagctcagaatacccaagatacaactcacagaccacatgaagctcaagaagaaggaagaaggaagtggggatgcttcagtccttcttagaagggggaacaaaatactcacaggaggaaataaggagacaaagtgtggagcagagactggaggaaaggccatgcagagactgcaccacctggggatccatcccatatacagtcaccaaacccagacactattgtgggtgccagcaagttcatgctgacaggagcctgatatagctgtctcctgagaggctctgccagagcctgacaaatacagaggcagatgctcacagccaatctttggaatgagcacggggtccctgatggaggagttaaagaaaggactgaaggagctgaaggggtttgcaaccccttaggaagaacaacaatatcaaccaaccagaccccgcagagctcccagggactaaatcaccaaccaaagagtattcatggagagacccatagctccagccacatatgtagcagaggatggccttgccaggcatcaatgggaggagaggcccttggtcctatgaaggcctgatgccccagtgtcggggaatgccaaggcgggaaggcaggagtaggtgggtaggagagcaccctcatagaagcagggggagcggggacggaatagagtgtttctggaggggaaactgagaaaagggtaacatttgaaatataaataaagaaaatatccaataaaagaaaaaaaagtaagttgcaaaaactttatgcctacatttacttactaatttagttttgaaacaaggccttctatgtagccctggctgtcctggaactccttacatacaccaggctggccttgaactcacagagatccacctgcctctacctcccaagaactggtattaaaggcatgtgtcaactacacccgactcaaaaatatttttgaaatatatgaacccaagccaggaatagtggtgcacacctttaatcccagcacttgagaggcagaggcagacatacctctgtgagttcaaggccagcctggcacatagtgagttccaggacagccagagctacatagtgagaccctgtcttgaaacaaaacaaaacaaaacgaaacaaaacaaaacaacacaacacaaaatgtaaaaaataataaataaataccaaagcaagcacttgaaacaatatttttctattaaaatctgttaagctccccatgccctgttgtaggtacacagggcgcaggctgttcccccttcctcttcctgctgtcttctgctgctgtctttttaagagagagagagagagagagagagagagagagagagagagagagagagaaagagcaggtatgagcatttaccatggaaacgggcagaaacaagtgttcagaaaatgtcaaccaccctcttcacagtggtaatgccactaccaccaccagccccttactggggataccagtcagaaccaaagtcaccttggtcctgtaaaccagctccctgtctgctgtgtctgtgttgtgggttctccttcttcgaccctacactgcactctgctacagttggtgccctctgctcaaggcaggccacctggatgttagtccagggctggagctttctgtccatcctcccaacactcctgcatggcttgctctctcttacagtagccctgtactggattcccagggctctcgggtttgttcctctgtgcaacctccagctccagtcctatatttgcagtgaaggcaagagcagattgttctcacccctttaacggcccctggcaggcacctgctcacccccggattattcttatgttctcctgagtcacctgtaacccatggcactggaaaggacttccattgttgaagccagcacttgtaggctgtttgggtgagacagcaacccagagccacacttgcagagcctgtgatccaacagctgggtttttctgctaacaacttctgaagcctaaagtcccaccttttagtaacttgaagtccccttgaaaccgactcaactggattcgacacgattcgtttcatcagtgtttacacagtgcttattgctttgggcatggttatgggctcacggccaaaggaaaaatggtcaagggtcctggcttgacagaactaaaaatttaaccaggagcagagatgctggacaccaagccaataaacacatgaggttaaaaaaatattaagagtgaacactgtgggaaagttgatttccttcaggtgattctgtcggggatatccgaaaaacctcaaaaaaaaatttttttaaaaagcattaaagatctgaaaggagagctaaaatatttctcatataaatagagctctcttgtttcaaataaaagaagcaaaatagaccagagccaagtccaggagcagcaggagcttcaaaggacactgcattcatcccattgacactggcattgctggaaagttcagactcgacgtgcgccagcaaaggaaactacactgcagaaagttctccaggccgggaaccacatgctgtttgcacaaaggaactaaccccaagggatggtactgacccaagacaaacacgctgcaaatgctgtgtgtgtgtgtgtgtgtgtgtgtgtgagagagagagagagagagagagagacaccaactgatgggggatgggccaacatcagagaccgagcacctgcttgcctgtgcttgtgattatagagaccagaggtcagctttgcgcatcttcttttgtccctccccactttattttttgagacaagatctcactgaacccgataacttcttccaaatagtgtaaaaagcaaagtgaggcaggagaggaagctggccaaggttgccatggcctggttactaaggtcaaagccaactgattgatcgtgatcacattgcatatcctggacaggatctgaccagcatggtttctcagtgttcattccaatactagccgcctcggttagaccacgggaaaagactcagacacgttttaataaagaggcatcttgacaaggctgcctcaaaactagtcaagtctaaagacatcaaagtttgagacaatatcacaaccgagagaggcctacggagggtgatgactagacgaaatgtgctgcgctgagtgggatcctagagcaacgctcaggagatctcaataaaatgttgaccttgtcagtaacaatacgccgttaaccgggacacgggactgtgttagttacaagacgttaacgtaaggaggctttgggcaggaggctgtctgggaagtctccaccctgaaagccctgctttcgccacagtttcagctccctgtgatcaaccgtggttcaaaaacattaaacagataattcaaaaaagaagattcattgatttttaaattgaaagccatctgagaagtatccaggacaggaatctttttttttccctctctctctctctctggcatatccattcaacgacagtggaatacacatcttcccccagggactcccgagatagccatcgagacagggcacattctggctcacaaaagaaatgtcaccagatctgcaaagattgaaagcatacaggtgtgttcttggaccccaataaataaggcagaaatcaataacagcggtgaatgaacaagtcccccaaagacttgacagttcactggtcaaagaggcagtgtcaagagaaactgaaaaagaaaaactgcttttaaataaaaatgagaaggcacagatatcagaaggggggaggggtgggactcatggaactctgagagggaaatttacggcagtaaatacgtgcgttagaagagagaggagacttcgaataaataatctctgttccgagactccgcggaaaaagaatgcaaagattctcagtgagctgaaagaagggaaaaggtagaaaaatggggaaataggggctaatccaggacacagaagctaggttcctgaaaaggtcactaaactcgtgagggggtgggagcagagttagggaaaggaggggcagagagtggattaatcctaactaagggtgtatgaaaaactgttaggagacaccactagtttgtaaactagttaaaaatacatttctttaaaaaggagtttgagcagaggtaccaaacataagtgagcaattctgttccaaaaagacacaggttcttacatggaaatctggaccctaggcacaagttaccacctccccatggatgattgatcagggaggctcgaatacaggcttccaaagaatataggcagttgtcttggctcttggttccccactataactaaataacaagaccctttcactgattataggacacaaacaaattgatattaaattgaccaggaactgtttcctcctggtcagtgttgtagttctggaaagtgttgtgtaggctgttggggagtagggcaatcaatgttcttatttactggaccctgattgttataatattgacctatcaggcgatacatgtttaccggtacaatagcggcaagactgtttatgaaggtaacagatgttctcttcattggctttgaggcctgcttcacaaaagttatacctggtagcttaaacactgtcaaaacccaaggctagagatgtcactagcccaaggggagaatctattagtattgttcttctagatggtggttaatgtagagactcccagctattccaaatgctgagaccaggctactgtgagtacttagccacaaatgggacttgtacagcaaccctccctctctaagggtcagggaacagtgcggacaaatgtgtggaaagatttcttaagtctgctttcgcggattacagtgctaactagcctcacattaatgtttttggttattaactatgcagtttttgtcctcattcagcaccatggactttctgaaattcaaatgtaactcagcagcctgtgttttgcttggcaacccacctgcatctcagggctatgcattggcttgtcccagctctactgacatctctgctgcttgtgaaagtctgagacttgcagattctcagaagggacagcttccctcctaccatgtcagggtctcccaggagcccgtgagcaggtgagccactggcctgtccaccctgcttctttccagcccctgtaagtctgcagtcagtcttcttctcactgttattgcccgagatctcagagcttatgggctgggcttgccaggagaaagaaaaaatatccacccaaaagacaagaagtttgggggaccctgggccacatgctcaagtactcagagctcctgatccacaaaggtgtgtgtgtgtgtgtgtgtgtgtgtgtgtgtgtgtgtgttaaagaaggttcaaattcatgaggatgggaagtgagagtgcaaggctggccacctttcttcatctctctctttccacaccttcctgcccaaactggtatttttgtcttttatgaattacaagtaaggcctttgttgaagtctggggatctaaggtcggctttggagggttgtggggagtctttttagttcctgcggctttgtctttctgagccttttcagtaggttctattcctcctcccctcccctccccacccctgccacgcccttggctgtgcccctttcagcacattcccacactctgattcttctgtggcctgctgttggaacgtctctgaaattcccatgggcttctgctcagccagcgcccttcccttggagtacacatgggatcacagcacacatgttttcccagactctctcaggccgacttcctgttgggagccctggaactctgagccactcagtaccatgtgacttcagtactgggtgtggcatctcctgggtgaaagccacatcctctccctcttcagcagacatgcaggtacagagggcctgaaactgtcactagcatctcaccaatctggtctacggcttccagactgtttgtaaagtcagtttaagccacagccattgtcaaaagttacatgtaatcctctagggatacagacataccagtttctcattattaacagaacacctatcagtagtaactgaaggaaagaggctttgttttggcttacagtttgagggcacagttcgcgagagaaaattgtggcagggacagcaactgtggcgtgtaccactctgaggtctcccaagcccttccatatgcaggtcccatggagtcctgatgcctctatgacacagcagtagcaagggattttgtatgatggaggaggataccctgccccccgcccccccccccccattacagttggttttagtgtcaactctccataaattagaatccccggaactgtctgaactgaagatgtgccctgattgtgtgagtggcttggggaagaccctctcccacttactgcccttattcacttggcctcccctcttgcttcagcgatgatttaccctgaggctgctgattcctttcctcacagtagaaccagtgctcctagacttccactgatgactgtggtccaggaatctgccaggttttcagggccaggttggcactgctgagacacacaaccttgtggatggagcaattcctgggtgctggcttctccagtgggagacagctactgtgggactaatggacaatcagcctcaaaaccgaatgactgctgtcctagcccctcagggatgattctgctgttattgctatcttcacacaagctgacttagtacctcccttaatacaatatatgtatatatatatatacatatgtatattattataaacacatatgtgttgtaaatatatattaaacatgtattataaatgcacacatatatctttcgcctggcttcataattctgtgcttcaatttcctcacctgaaaaatgagaaaaatattgagacttatcttctccaaagtatgagggatgagctttctctgaagctgtctactgagcaggtttcagtgagctaaaacacactaagatcttagcataaagcccaacacacacgtacacatgtatatgcttaacctaaatataccccaatttcttcaactctgtcacatcccctaagagttccataaaccacccacaaggcggcatcacccactaggaagcaggcatttaagtacaggagtcagaggaggacatttcacggcattcacagtaggccccagtttacaatgtttcttttcactcattcattgttgctgaaagatcttttcagaggtgtaaacatgatcatatggaagtcaggagtctgccaggtttggagggaggtggaggacgggagggaaaaggcagtcaggggccagtgtacatttgtacatcacactctcctcccactcagatgatgctgacaccatggtgatgaccattgagatgatgtcatggggttaaaactcactccagtgacctgcatgaaagggaacacttgcctggggctttgtctttcctgccccatctccaggtttggattgccatgatagaatccatcactcaggctcagacctagccaaaggctcaccagagtcacataaatcccctcaactgtggcgtgaccttgccctcctggtctctccctgtcagctatttcctggacacctgctagctggagctgtctgtgctttcttcagagaccccctcagcctcagcctcagccttgccctctgccctgcacgtctgcctccctcctctttccccccacttctgctctcttgcccccatcacttaccctgcatcaccacctccacttgaccccaagcccctgcactctaagcctctatggcagtccttccagctgtctgcctagcgctacagaggggtataggcaggagaagacagcaggtgactggaactcacacctgtgtctcacaagagacatggcaccatagtgatgctcactggtgcccatttattcagctagactctgcacctggcagcctggtttggttaagcacagagaatgagaatggcttcctaaatggcaggagccttttggactccagagtttctcatggttcacggaagtttgcaaatgaagctgagcgttaaacacaagttgaagcacattttagggaacgcaagaaacttccagaattggaatatgttatgggagagcgatgatgaggtgcagggcgctggccatccaggcagagcccttgccttaactcctgccacacctgtagaagatgaggttccagaaggttgctggcaccatcctgggcactacattatgaccccgggtggagggagatctctgcactaaatgtgatagtcacacttagatctggctggtgcataaaggatctacaaggaacgatggaggttgagtggagccagtatgaatggccaagtacactcagtttgcagacacatggaggcctggccactggggaagcctttagggactggccagcaggaccgcaagagggacccttgctccctggtgttggggaggtgggatctttgcaatgacagagaaaggagtacaggcctcccgaactactggggattttacaggacttttgaaaaattgggatttgaaacttttaaaaccatgcaacattttcttagttgcaaaacaacaaaaattacataatttcaaagctgtgcaagaggatgaggcaaaagcatgaatcatttcccatgctacagagtgagcaattgagcaaatgttactggccgcatccagctgctgggatacagtgtttatgtgtctaggtttgtatgccatggctgggggggggggggcgtcatcttcacctctctgtgttctagtcatcaagacaaaagggtgtgttccacagcaagacaaagatagcacccagagctggagcccagcatgagggttagctgagaacatgcaaaggcacgaggaaagagcttgctgcgatgaaaactaaaaaaattaaatttaaaattaaaaagccgcaaagatccacgaacaaccccagccttctttaaattgcagttgattttagataaaatcactcttcacttgagggctttaggagccagttctcggctagaatgcatgtactacccccacaaccttagaggaaaagattccaggctggctcgctcttggtgagactggtaaacacggtatccgatagtagtgtcagagaaggaagtgtgccacataagctccctgatcagagggctagctgggcctatcccaggcccctttatccttgccctaccacagccggagctgttgaatgtacagcacagtcaacaaccagggctgaaggagaaaggtgaagagggtgtggaggagacttcccacactgctctaagaaatccctaagaagagattagttttaccctatgaagctcagattgtccacagggtacaactgagctctgtacgggtcctctgcctgagaagtggctttctgtggaggttgagggatggagcccttttaggacctttgtgtccttgttcctggtaagtccaaagacaaagtgggtcttaaggttatcatattacagtgtagcttggctagggaagttagtctactgagagagactgagaatggccgtgggggaggggcgtaacccaggaaaggacaagtggaatctagactcttcccatcataccagaggttcggttcgtgagtcccatgttgtaggaaatggactagggaggatgtctcagagctacctagcacaaaatgagctactcatatgcactgagtgcctagcacacaattctgcctaggtggggagggggaggggagttacctcatgtctagcacagtcgctctctccctgggataccctgtgttgtcacacctgatatttcatcacagctctgctggtggctgtcttctaggcattgtgctgccttggtggtgagattgagtgagcaagctgaggacagagaatacaaggttagtgcttctccaccccggggatacaaacagctgcatctccttctctgaaggcgggtttgtctgtggagttacaatgcgaagaaattgtgcctcgtgtttaaccttccagctgcctcaattctgagatgggcacttctgccacagaaagacttccacacagagtagaactggcaggctatgtagtgtgcaaatccctacctctgagtccttagccatttaaaaaagatacagtgtatgtgtgtgacatgtgtgagcatatgcatgtggaggtcagaggttgacattgggtggctgcttcagccacttttcaccgtgttttggagagtatatctcccactgaaccaggagcatactgattggctaggggggctctgaaaatccacttcccaggactcagactgttaggcgtcattcattcattcattcattcatttattgttgggaatattacaaaatcagctctagtctggagacaaaaagagtggttcaaggttagcagtctgtgacaaggtagcagtctgtgataaggttagcaggctgtgacaaggttaagttaagttttgtcagtgggcagctcccaacagcacctcctccccttccacattcatttatgaagaagcctcctacacggtgctattaaaatcaagtcttactcatctgcttagtcaatgctgagccgatttctttcataggttccctgtgaatgagatctgaactacccggacaagaaaatgaaactactcaaaaagaatatgaaaatgacttggggagggggtcaggaaagactctgggctgtgcgtaggcactgggatggaggagacatcaccccaccagggttttaggaccctctagattacaacaggaagtaaacagcctggtgttaatgtggctctaaatgacctagctccaaattagacttctcatcatggacagaagccatggggtctgcatcaaggtgaagtcactctacacacatggcttcaaggctgccagctggtgcgtgggtgtgatcgaggctcctgcctctcctagtgctagtggggtgccctgaggcaagcagcctaaccagactgggccccagttcccttcctggagcatgcagctgacaaggaggtttattccagaggaggagggagggagggagggaaggctcctgtcccatctccagttcatggtatataagaatcacattaataccaactcttgattattaaactgtccaccttcagtctatgagatatctagtccttttgtcatttagtcacataattagctctttctggtagtgtagtgagtacccatgatccccctatgtagtccccgagatctcattaaccccctctctctatgtctgaggtcaccgctctctcaagatcagtgatcctcatatatatatatatatatatatatatggaaagtacttagatttttatcctttgtaaaagtgacatgctgacatgctacatgcaacttttggccactccctttttgttacctaatgttagctacaagagccatgcatggtatgatgtgtcaccatggtcgttccttctgagtgctctgacatgtgatctcctttcaaagcctgtacatgggagaaatgccactcctgtaccagcacaaatgcaatgtgccagcaggattcttacaacagtcttctcaccagaaagcgtggtacctcctttcccaaggccccttcagagtagcagatgctctctgcactttcatgttctcacacattatttttcgagttaggacatttcattgagctttgaggctcactgattcagtagactggctgctggccagcaagctccagggaccctcccgtctccacctttctagagatgggattataggtttgcgctaccatgcttgggttcttcgtgtgggtcctcgggattctgactatagtcaccaaacggagccatgtatcatcatggctctgacttctgcttcttcgtgaatctagtcaacagcccagtttcctcctctgggaattacctgttggtggtttatcacccattgctgtgctgggctgtttgctttgttaaaatcgatttgagcggttccatacggtcttggcagtaagcctctgtggttggcattacgaatgtcttgtttcgatttccatcttgtcttttcacttaaaatttctgtgtggtgggcctggagagatgcctggagagatggcgcatggcttacgagcacttgatcttgtagaggacccaggttgggttctcaacgctcccatggcggctcatagcaacctgtaatgtcagttccgggggatctaacaccctgtgtggacaccgtgtgtgcacagtgcaatgtacacgcaggcagaacacccatacacataaataaaataaaataaaataaaataaaataaaataaaagtccttaaaataagctcttttgttttgttttctggagtcaagatcttcttacgttgccaagctgacttcagctcacaaagcgcccccgtctcagagacttgaatgctgggtgtacaggggtgcacagctatgcctggatatctttcaattggtagacacatctcttggtgaaccaaagttcttgattttgatattgctaatcctatcattttatcatcaataatttatgtgttcagttaagaaaatactcatatatcctgtgtataaaagatattatttattatgaaatctcaagtgttgggaaaactttgatcttttcatttatctgggtttatttgccagatataatgtgagggagattcccaaactcatttttttttctctcacaggaatagctgctttccccagctctgtttagtgtccactattctcttcaccactaaccttccttattctccctcacactaacactctttatatgcgtgggtctttttctgagtctttgtcatatgctgtgatcatttttttttctgtctgtctgtgcaccaatgctgctagacccatcccccagttccagaatgcccagctacatcagggaagttgctactcaatgatatttcatgttggttactttgatccttcaactctttcaaacaaatttcgaattattcttttcatagtctctctttaaaagtgaggtgggtgtagtggtggagagatggttccgtggttaagagcactgactgctcttccagaggtcttgagtttaattcccagcaatcacatggtggcttacaaccatttgtaatgggatctgatgcccttttctggtaagtgtctgaaaacagagacagcgtacttacataaaacaaacaaatctttaaaaaaaaaaaaggttaatgtcaaaaacgtaagaactgaggctggaatgttcagttcactggcagagtgcttaattacaggcaagcagcctcagtactaaaaaacaaaaacaaaaacctatggggtgtgataggaaaaatatttaatcacaatatttaatcagattattcttggttatactgcaccccttacttactaaggccctctttaacatgtcttaatacaattttatactgttccttttgaagacttatatttaaaattttatgtatataaatgattgcccgcgtgtgtgtttatgtactatgtgtgtacagtaccaacagaagccagaagagggcatcaaattccctggaacccagttgcagactcttgactggaaagcaaacccaggccctctgcaaaagttaagagtaatctcaattattgagcccatctccttagcctcctgttccttttagagatcttgaatacctatcagatttgttttcagagaactgactctttataaatgctattttatatcttcttagctaaactttctagttgcttaattcacaggggaatttatgttaatcggatttctgttattgtaacaagtacctgagatcatcaatttacgaagaggaaaatgcttacaatttgagatcgccttgcttttagtgagacagcacatcatggtgagaagactatggcagagtaacttaattccacctcccagccagggttggtaaagagaagagataaaggagaaggttggaatcccatagtgccctttgaggacacacccacagtgacacttgagatcacctcttcaagttccaccatgtgtcagttgctacaagtcaggatccaacccttaacccttatccaagatccaaaactaaaatttagcaaaattttatatcgcaccaccttttttgtttcattggaacttagaagatttttctataagatttggggggatttttctataaacaatcttatcatatgcagatggtgatagtccatattattatgttacataattaccccatattactatgttgaagatgtttaggggatatgcaaataaagcaagtggcagtgattggcagttacttaatgttcaatagatgcttttggtcatccacactactgttttctcaatcaataaataatgcttttaaaaattacgtgagagggctggagagatggctcagtggttaagagcactgactgctcttccagaggtcctgagttcaattcccagcaactacatggtggctcacaaccatttgtaatgggatctgatgcccttttctggtatatctgaagacagctacattgtactcatataaataaaataaataaatctctttttaaagtgtgagaaatcccttcatggcaagaaggaagcagctgttctgttttaccccctgcccaggttccactgccactctagggtcacagctaggctgggaatcttgggtttctgggccacaaagtccagtgtgcctttccttattttcattacattttgattcctactgagagtatgtgcacacatgtgcacattcaagacagggtggatagaggtgcagagttaccatatctacaggtgtgtgcctctgggtagcttccctctcccacactggatccccaaggacagccctcaagtgcttagcacctccttgtccttcccaacaatagatgctacaagaaccaagggttctcctttgaatagcactgaaaggaaaacatcttagcctgagctgatggcttaagagaagaattcacttgctttccagtctcctcaccacgacaatgctgctttcctgctgtcctgacatcggagccccatgatgatgacactcagagtcagcactgacctcagtgttctctgccctgcacgggcccaagtgtacttctggtatttcagagacgtggtgatggctctctcctgagcatagaaacaccttggagccagccagacctgggccagctggcagaaaacccatggaccattcttggtcctcccaggagtactctagaaccagatctgggactcggcttgtccggcctcctggaaacatagggagagatatcagggtggtaagtctcaggcacacagtataaagcacaattttattcacccaggaactgaacacacatgatgctaagtgaggcactgagtaaacagactaacaaagagatggcagggaagactttagatggagaagaaaaaaatctacctttgaggttcacattccactcccaggtgctcatcagtgacctcagaaagtccccaacatgctgagggctcgactgccaatcattaaagctctacagcagtcccataagtagattctgtgaacctcttcttgttttacacatggggaaactgaggcatcgagcagttagatagttttctgaggtcttgagggtgacccacaatttacaatagactgggttttaatcatatttgctccaggcattcagaataggggtctccgtgatgtgggtttcaagggtccagccaagaggccattctaccaaaaactcattgtaccctctggctcgctttgtgtccatatccagggttataaatctttgccctcattgtacatctagctgtcctctcccatcacgtgggtttagctgagatttttcctgtcctgcctgccttcctttgagattgtgtacccagggctagcgttgccaagtggtatctatccttgtcctagaaaatggcaccagttgttttgttttttcctgaagagtttgaattttcaaggatgttttggtttggggggttattaagtcagttaattggatgcttcttcactgtgcctgcttgagacagggagggcctgtggcctctgggaggattcagggaggtggggaagttctacaaggaatcagcagtgtcactgctgtggctctcttggttggcttctgcccccattcagagcatctactactaggttcaggtccattcgatctaaccctgaagatggagggctggggcaagcggcaagaggatgcaggtgcacctgggacttctgtgtcccccagaagtatcatggaatttgtttttttctcattgaagagtatgaaagtattttatagattggtcagtagtcaagttttgtaattgtacttctaggtggtattgacaaaagccacaaactggctgtcctatatggtaatgtgactctagatccactgaagcctcctcagccagtacacagggaagagctgtctgggtggagatgacattgtagtgtctctggggtgcaactgtcgagtgccaggacttgactgtgtggtcctcactcagaacccttgagtagaatgacagaaaaaaaaagaggatagaaagcaaaagaggaggggaggggaggggagggaagagaagagagaaagcgaatgtttaatgctgcggtttcttttttacaagacaaaactcacataatttagatatatgcaaacaaatcttaagcgtttaaaaaaaagtttcaaattaggtcatggttcccaggaaagacattcttgtcttgtaatatttaattttaactttttatcaaagaccatctcaaaacataatcagatagaatattataatccctgggtcatgagatccacttacggtaactgtgtctcatctgtaaccctccccttgctgctctgtggatgagcttaaaaagcaagtcctacgtgctgcatgactttgtctgtaaaaatttagtgtacgcctctaaaatataagaactcttatttaactacagttctctctctctctctctctctctctctctctctctctctctctgtctttctctctgtctctctctgtctctctgtctctgtctgtctctctgtgtctctctgtctctatctctctccatctgtgcaccccccttgaggcatagtttttctgtgtaccctaggctagccctgaccttatgatcttcttgcctctgcctctggagtgctagagatcttagttcatggaaaattaaattcagttaatgaggtctaagcttttcctttatccataaccttcttgttactttaggccttaaattactcaatgttgcttaaagcctgacttttagtcctaccgtggtccttccagaagcctctctgagaacagttatgggtgctagatcccacgtccagaagcccactcctataataccagtgctgtggggcctaaggcagaagaatgctgagttcaagaccatgcaccaaagagtcagggctcatctaaaacaatgaataattaaataaaaggaagttagaggtatgacctgagattgagccacctagacctgcagtctggaaggagctgagtccccagatctgcaacaactgaccatgatgctgtaaaggcaccagcactctttctaggtttccatccttgtggcttacatgtgagttgtctttattcatagctgtagatgtgaacaacaacaaggttgacaggactggaaacacagcagcaagcagagggacaaggcatctgtcaacaagatctatctggaagagaaaaaagaagggccatgggtccatgagccaggtctgacatccagagaggacagccgtggcttcccagacagcactcagctgtctgtagcaatggctggaggccattgataggaagctcaagtagtttataaataaagcagtttctaagttgtaaattggctaaatccctgctagctgtgagcaagcttaggggctagcttgtgcttggttttgtttttgttttgtttcaacatggggaattggatgcagggtgctgctaccctattctccaagagtcatggagaatgtggtgtatgtaagctgtcttcatgtgagtcctgatagggttttgggaggtgtggaagtaatatcctggacatctggctggcttctagcttactggatctggtgtttttaagactctttttccttgagggttaaggtcaagtgaggtgagccttttcatgagactggaagacacccttacaggaaggaggtgttctggcagcctaatcccataggttgcattacaatcagtgagtgttttgctcaagtgcccggcatcttagagaagtcattttctttctgagggagtgctatcagtttcatgactacacgctctgcatttcattagcattcttctagcaaaacacgactctgagtcatttctgaaatatctgttctcgcctgagagctgtttctcagtttttacaaaaaaggtcttttctacttaccggcagaaaagtttaataccacacaacacaacctaaaatgggtatactgagagagagagagagagacagagagaggcagagagacagacagacagagagaacacctataggctgtgactatgaagcgattccttctctggccttcagattaaggccatgggtgccagatgatggagctaagattgggtgtgactcatgggggtagagtttcataatagtgacattggacatggttgctttctcagattttaagccttatcaaggttaagaggacaccagtgaacaggagggagaaactggaatgaatgtctaaggagctggttagttctggctcactgcagtcaaacatcagttatattcagctcagagaggctgtggcccagcctgtcccctgtcccttggggacacttcctctaggaaccacatacactgtttcccattgtcctagatattaatgtgtcttcgtcagccatgggcatccatgtctctctgtctaggttttgcttcccacctggaggtcaaccataatggaggaccactgatattgtctgctatacccaccagccccatccacagctcttgtgaaggtcagtcttcattcccagtgaggaatgtccatctgctctgcagagcatgtgcctttgagtcagaggcttttgtccaccatttcaggtagggctttaacaaactcagcagacttcatattcacaaaaggtctgtaagagcttctagaatcctctggttcccagagctcagcagagtggagtgaaaaggagttgctttgcttggctcttccactgatgggcgggccagctttcctaggtaacaatcagaggcaggacctaaaggatggttttcatgatcacctctcattctctttagtcaacctgtagatgtgactgattagaagtgtcctaggttggccctcctaaccttatatcaccacacactctgcggggttcagaggagacactgaggttagaggagcccagcaataataaacttcttgttgtcattctgcggaacaaagaatgatctagaaatcaggcactgcattagagaacacacagggctccagaaaacctcacctcaagaggcagacgctagcccctctactctccttgaagcaattgcagccacgggcctctcacctgtggaacaacacctctgttagcatggctccctgccactcacactcatatcttcaagagaaggacctagaatttctttggcccttcttagtactcttcaatcaagcttggatgctttagtaagcaccaacatgaggccacacccttcaccagtattacagcaggacaaaccccactctaggaggactgtctggagtcacctaaagtccagaaggcctttggaggccaactagatgacgggttagagacttccagccctgctcatgcatccacaggctctgaaatgaattccaccatcgacacatttcaacattttttttcttttgacatttttttctttaacatttactatggtgacagtgtatgtatagcgctgttgggcagcatgatttgacaaaagacaccttccctccacctgcagaatatgtgatccagcaggagacacagcgtgatcctctctctctctctctctctctctctctctctctctctgtgtgtgtgtgtgtgtgtgtgtgtgtgtgtgagagagagagagagagagagagagagagatatttctgtgtgtggatgtgtgtgtgtacatgtgtgtgtgtggggggtcattgcatggcatcagtggccaagagtcaatgttgggtgtcttcttctattgctttccacagtgttgtattagagctagagtctctcactgaacatggagcttgaacaagccagcaaaactacctcgccagcaagccacagagatgctttcttcatttcccaggactggggttacaggagcacaccaccctttttataaaggtgctagggatccaaaatcaggcccttgtgcttaccttagctgtcagtttactaactgagctgtcttcccagccgcccctcttctaccttttgctgataccacctaagagcatagactttagaaaataagtctccgtgaacaggcttaaccatcgtggttatttagttgtgttagcacacacacacacacacacacacacacacacacacacacacacacattcactagccacttgagcaggatagcagacaacaagcatttcagcaaactgttggatgagcttaagtaggcagcagttctcagcccagatgacctgtctgtgaagactgcaaatccatgaactgcaaatccatgattgttcgctgaacaataaaatccttaggaacataatttgttcttctttgatcacttactgcaaccccagggtcttggatggcattgggctcataactattgctctctaagagtttgctaaatggataactccatagaaggacctgtcccaggggtagttgtcaggagatatttgggtatctggattagtgcctaagacctgccatgcccgacatccatgcacagagacaatagggtagtcacctgggacaaacacttaggagacctgtgcaagggaccagagggaggcatagcaacaccttgaaaatctaaccacttcgtgctcctcaaacagttgtctccaaggtagtaatgtataattattctgcctcatgtttcttgagcttggagcctcagtttcccaaattttcaagcaggtcgctcctcttcctctgtgcttttgagaaaggacttagctgtccttcctccctcccccaccccaagttcaaagcaaaaagaaatgttgcaaccattcgagttgatctggtgtagaaggacggcagatgcccgtgcaggaatggtttctaatcgagtgtgactttcttcattaatacctgtccttgcccgcagcagcaaactgacaggcagtacttgcctgtgtgtgctgacatggtgtaggtgatagccaatggcttggattaatttttcttgatgatctcatcgtacttttaatgagatcggtggcatgcatgccatttctggggcaaattaatttgtccttgtaaaatagagcatcagcagtttttctttcctctgtgtctaatgcgtaatggcatgtgttttcggaggcaattgatacaacctaggattactggccgtattgcagggaggatgcggttttgccaacagcaataaaatgcgaaccgcagccctagcagctgatgtgtatttggaaaatggggtgtcggtgttttgatctttgctttccctgctgacgtggcttgatagacaaagatccaaaaagatgagcaaggtatgcagtcaagagctctcagcttcgaagtagccacagggaagcaacatggccatgaaatgcggccgtgtctctttgcagggtgatcacacacactgtggtcagaaaccaagggctcacactgatggcacagccctgggctgtgacctgtatttcttccatctgcatatctcaagccattgagggtgaaacctggagtgttatctaaaggaaacattgtattcagctctcccatcctttcatttctgaaatgctagcacctcatttgaaggaatcagatcaattctgtatcgttgtgggaaagactctggccacagtgcgagtctctgtggccttcttcttcttcttcttcttcttcttcttcttcttcttcttcttcttcttcttcttcttcttcttcttcttcttcttcttcttcttcttcttcttcttcttcattgtctcctttaatcaaaggttaagatgatggtttggaattgggcaagtaatggaatcactttgaaagtgaatcatttccccctgaagctagatggaaagattttgcaggtgaaattcatgagcacagttttaaattgtaacatccttagaattttagctagggtagataccattttgaaaggagttcactgtagaagagaaagttaggctcacatcttccattccctacagggtcctgggggacaggatgaagtccttctcccacagacgctgcatggagagtaaatggactgaatagatgtcatttataatcggtttcattccatcaagaagtcaattaagaacaaaggaggcaggggctggagagatggctcagaggttagggctggagagatagctcagtggttagggctcacgcaatggctcagaggttaagagcccattgctgcccttgcagaagactcaggttgggttgccagcaccctcatggaagttcataactgtctgtaactccatctccaagggatttcatgccgttttccaacctctgtgggcaccaggcacacatacatacatgtagaaaaacactcatacatatacaattaaaatagatcttaaagtaaaaagaacagggagagtgtcccagcaccttctgtgttggctatgggtgaaggaatggtttgggagccatgtgacccaggtatggaccaactctttttttttcttttcacattgattgacaactcagagcatccagtagataggcacaggacaagcaggcaccacccctttatccaaagcctttactcttattattcctaacttgaagtaaaagacacaacccacacaagtaaatgataatcaggcagagaagcttagaatcctttatatttaagccaaggtggctataatggacatctgggcagcagaactaaacagcacctgtatgtctacatggatttgtctctgtgctgagtcacatagccagtttgccccacagtgacattcctgtgcaattgatacagatggctaggaatttagactctaaaaagccttctaattccaggtagtacttactatccaggatcgattcaggagctgagaaagatcatgagttcaaggcctgcctgagctgcatagtgagttcaggggcagtgtctccagaccctgtctgaaagagcaaagacaggaaaataatggatctctccattgccctccaggccacatagaggtgacttcaagaagacccaagagctcttcctgtgttgagatttccaggctggagttcagactcagcagaaacacagctcaaagcctcttggcctagacaactggccccattctttgcaatacagaaacctgagtcccttagttgggcttaggctcaggcagtgtggttttggcttgagtaggagtgtctggagtcctaatgatgaaagcattcattgcttgatttaagaagtgatttatgggactagcgaggatgctcagtggatgaaggttcttcatcaagccttatgacctgagttcaacccttgggatttaatggtggaaggaggataccagctccaagttgtctagtgacctctgcatatacacccatacacacgcgcgtgcaagtgcacacacacacacatacacacacgcacacacacacacgcacaaagataaacatgataatttaattttttgtggttttcttttcttccttagatttatttatttttacgttcattggtgttctgtctgcgtgtatgtctgtgtgaaggtgtcagatcccctggaactggagttacagagagatgtgcgctgccatgtgggtgctgagaattgaatctgaaccttcgggaagaacagcttaacctctgagccatctctccagtcccaataattatatttttaagaaaataactgatttgtggtattgtatctaggacaagatacaattttgcccttgtcctgagactctcaagtcactttacaatgccacctgtcctcatattaaggagaaagaggaggactagaaacaccagaggctcagggcactggctgctcttccagaaggcctgggtttgagtctcagtacccacgtggcagcttacaactgtctgtaactctagtcccagaagacctgacacctttcagcctttgtgagcactgaacacacgtgttgtacagccatacatgcaggcaaaactcccatacacataaaaattaatcaattagtttttttaaaggaaaagaagaataaactacttttcctctttagcagctggacccccacagaaaaggcagactctgaagtcaattcccagcaagagaaattatgctctgtcacatacagtatatctaaatcagtcttggtgttccggttctgactcaggatgtggctacgggcacaccacatataccagtccctttcaagctacatgaacaagtcacctctgtgacccagaagaccctgcttggaaacaatcacgaggctcagccacaagtcataactcatgctagggaacaccagcaacatggtcagacctgttctccaatgtcttcattcagtggttactctgagtggttttggaaggttcccaatttcacccatgtgaacgacttcactgtgcatagtacactcaatataatcaataccaacaaatgcataaacatgttcagataaatacaatgaatgtgactggcaagcatggcttttatagaagactttgtgaatatgcatttatatacaaataagaatgcattgttcaatgagatctggggtctgagggagggggtgttggaagacgttgttggaaattgagcacaccttgtgtgtgtcactgagccccacttcaggatctgaatccttctaaccaccaacttaactgtcttaaagcagccacggagattggatcagctcacacaagcattctctccatatttataatgaatcctaatggaaaattgatttttttaaatttagcttcacaaaatggaaaagattggtttttagcttttgaactatccttgagttaaggtagcacaactctacaatttcagggtacattgattttcccactgtctacatttctggttccctattataaacaaaaaccctacaatttatgagggctatcactgagttaatagtcaaatgccaagttactatataaagtaacgttgctgaaatctacttcaaagggatggcttcaacttagacgggaaaagtgcggcacttgaacctttagtacagtggttctcaaccttcctaatcctgtgaccctttaatacactttcttaatgtgtggtcacctccaattacaaaattatttttattgttactttataattttaattttgctactgttatgaactgacatgcaaatatatgatatgtgggatatcttatatacaaaccccagatgagaatcactagtttaggagaaaacagtagaataacttctaagattttgatccttcattcagacacagaaaataagggaaaagtcaccaaggatattagatagatattaatccaactctgtttgtatgagaaagccatagcaatggggagaaatcaggagtatagagtggcactttgaagactccttaaaataaggcaatccatgacagtggtggccatatcacatcatagtcatccattgtcacagagagcagaagtcacaagtaaaacctttctctatagtatcttattccacccgggtggcaagctcaggaaataatacaaggaagaagaggaacccctaactgaaataggtcaggtgacatgccaaaaccagacaactctctaccattggttacaacgatagggcaagccgtagagggcttgggctggcattctctgcataaacctatgtcgctgtcaagagatttccaagctcattgcccagagaatcccaagctcagcatgaacttctgtctgcatctttcctgtattttctgggccaggccttctgtttgaccacatgttctactttgttcatatttggatcaaggcttaataggaaaatcagaaagtgatttaaattctaaacaaagtacatgtgtagaaaaaccccactgttagcttctcttcttcttcctccccctccccctccttctccttctccctctccttctccttctccttctccttctccttctccttctccttctccttctccttctccttcttcttcttcttcttcttcttcttccatattcccaatacagatagatctatttcatttaaaggtcacatgataccacgggagactagagaacaaagagagaagacctcccaccttttacgtttaaaataatttaaggtgccagttaactattcagtggacagaggaaggtgtcttgggacctggctctgacccgaccacctcgagcctcctctccgtggtgtctgatatgttctgtgttgctggcagccagcagttgtcagtctggaaaggaattgagccagaatgtcatactcattttgaggctttggtcactggcactggagcaagttaacatcaattaaggacctcatccatcagctgaggttaggggcatcaaaagagtcaggcagacaggcctgggtatcagatggtgtctcaggcctttgctttttaaagttacccctgggactgagactcaaaaggaaacttccagaatgaatgctcaaacttccaggctgaatgtgttaccacatgacgtagggtgtggagaaaaagctgcagcacgtttttttaaattgacagataattattgtgcatatttacagggcacagtgtgacttttcaacacattgtacatttcaatataaatggtcatatcaggataattagcgtatctatcacttcaagcatttgtcatttgtcatttatttcttcaggaacctcaaaaatcttttctacctgtgattttaaaacatacagttaaatgctgtcaaccatagcaaccatactgtaacactgtcaaccatagcaaccatactgtaacactgtcaaccatagcaaccatactgtaacactgtcaaccatagcaactgtactataacactgtcaaccatagcaaccgtactctaacactagaagtcactcatgctatgcaatcgaatcctgggatcaaggattcccctccacccctctatctcttccattcctcctggtaactttagatacttgactctcaatctctatgagatcggtgttttggctttcacgtgtaagggagattgtgtgacatttatctttctatgcagcgcagtgttagcagcatggcatagattccctcaggtgtgaacacacacacacacacatctgggtgcttagaccttgacagtctcaggaatctgagcagggagtctctgatatcacaatttctctgtctgccctaggcttggatcagaggctgaccctgctaactttattattcccaagtaaattgtcctaaataccagcttcaaactgtggtccttggaccagcagtggtggtacccccaggagccttctgaaacatcagaatcccagagcacagcacagactcatcgaatcagaccatacatttggctgagatatgggaaggtttgaaggccaccagcatttgagaaactgagggttgttatctcaagccacccaagtagaagagtttcattatcggatgctttagaatgtgattctcgacctgtgggtcgtgacccctgagaaaggggtcacctaagaccattgggaaacacagatatttatagttcagttacgaagtaacaacaaaaataatgttatggctgggggtcaccatacacgaagaaccgcattaaagggtcacagcatcaggaaggttgagaaccactggtttagagccagttgtcaaacaaccaacaacaataacaaaaagcacagaaaacatctgatcatggaagctgcattatgtcacagtgtgtcccacaggatatccctctgccacacgtcttcacttgtaaatgttcgttacaacgagtcattgctctggttcgagatctttggcttctgtgacaccatcaatattggatcctcattgggactcctcctggttatcctgttgttgtcttgtgtcatggagatctgtatcagcaggactggccctttcatgtgttccaaccatttgcagagtcctggatctgggcctgggtggtcgggcactgaactggtcagtctgccatctcttttatccacaccactagggcaaggtcttcagcactgcccaaactaggcagcctaacacagccatcggcaggaggcagggtcagcatttctcatctcatgccttcctactggctcacttgcacctatgcctccagggccagctctactctcaaggcacagggccctcttctccaagtgctgcaagaggctggaccagctctcctgctctcacacccttggggctggcttgcctgtgccttttccatccgggtcagatccaatgtgttgcccagtcaatatatatagtcaatggctacagccattataggggcaagggtagctctcccactctcatgtcctcggtgctaactcaggtggtgaggggtgacttggggtgggcatcacccttgaacccacaccacctcagggcagacaaatgaagggccagctcttctgtgctctcaccctctggcttatctccatcccctccaccatggccagctctaccatgttgcccaagggagatgcagggcccgctctcccaagtcctgcagctggtgagggacagggccagctcacccagtctcatgaccccagggccaggtctctgaactgcggcaagtgacgagggattcattttgttttgtttttacattagtttggcatggtatctacaattggtaggttcatgcctggttggatgcttcatcattctctctaccaagctcttctctggagagaatcacagtctatgtgtatctcagtagcttgaagattaggggaagctccctgggtctggtcatatgtgtgactgagcccataggtctctgaagaattctctgtggacaagatggccctgtccaccctgcccatgggccaaacagggtaccttggcagaatatttaaagctgagatccaacctgtactcaattccagtatttacctgcatttgcaaccatgacgttgtgtaagaggagcactggccttgtctgcttgcaggcctcaggtgactctagactgacaagggtcggctctatctcctggatcaggagaacaagagagccgagaataagacaaaagacactcaacccgcctctcttagtgctgtgagtgcagatgacccctggagttgaaggcaggctactaatcaattcccagcattcactaagacactctatttggcccaagggcagactggacaggaccatctgggtagacctggctgcctgttcatgatgttgttggcaactgtttggaattcgttttgtaggtaagtggaacaatgtagttatcacaggagctgggggtctatctttataaaagaactctgcagcagaacctctttgtacaatgaggagccatctttcctaaacagacagctaccctgatagaactgtatatgtatcatttctatatgaacaaacacatcacctggagagacacccacatccacacaagtacaccttagcttagcagtggattcatgcatgtagaacaatccatcaaggttgctctaggctgcccttgcagaaatactggttcctctaatcttaacctctcttgaggcctctgctttccgcaagggagcaaaagaagagatggataacctggcctgcttctctgcagccttccccacaacacttctcatccccaacaagtggacccaaggccacagcacgctatagggggcctgggctgcacagttttttttttaagatttatttacttattatatgtaaggacactgtagctgtcttcagacactccagaagaaggagtcagatctcattacagatggttgtgagccaccatgtggttgcttggatttgaactcgggaccttcggaagagcagtcgggtgctcttacccactgaaccatctcactgggctgcacagttttgactgtgattccatatcatgaagatggcatgctacattttgggcaacaggtcctcccgccccctcccgacatcatgtgttcttctgcatggatttgaaagcaaatctccgctgagatgtccaaacttgtgtgtggaagttcaaatgactgattgtatcttcggcttagagaatggatgggggtgggggctgggggaatttattcacattttgccaggtgtaggaaggagaaatgacagtcctcaggggcttcctgtgctgggtacagtggggttgattttactcttagaaaaccaagccagaaagacattaagtgcacagaggcagctttgtggcctgttatccagagagacaggatcaggccaaggatggcgtggcctccactagccacctgctcatctctctgaccagttccggaatctgagggttctaaagcttttacagatctgggctgaggccggaaccgcctctgagcattttgtaatttccctcaatttcacaacttccctggtaagtgttccttctccaaactcagatataccaagttcttagaaaatgaagaatagatgactgagcccctcccgccacctttgtcctgagttcaactgccatgttcaaaggctggaagggtctggtgtggaaggaagaactcagccctgagttcccacaaactgaggatcttttcttagatcctcccctacgtagtttctgaacttgaacaagtattacaggcccacctatacatggggcagaatgtattgccaagatgctgtgtgggctccagatctgggcctagggtttttctcactggtggccagtgatggctgccgaggagctcacttgaggtgtttaggaaccatcattaaaaataaggctagaaaaaaaaaatttttttaattaaattaaattaaagttacaaccagctctaaatgttttgagtctgaaggcttgacccaaggtcttgccatctcatttcaaagccttctctggggcccttgagttgctcactgcttaagcattgtgtctgactctcctccgctgctgaactcatccggtgactgacagctctacaagcctcatactaaaacctcacctcctcctttaactgccaaacctcttttactgcagactttagagtagaagccactctgttctctgtgttgttttgtcacatcggtgccaaatctttgaaagctttaaaggcctggacagaattctgggatctgcctctgggttcacacacacaaattctgccaaggccaaggatcttggcaggaaggaatccctctcgtctctgggcttgttcatgatcgattatgtatgccacggccttgcttgtcacattttacatgcctctgaggcctcagtgggtcctccatgaactaaccctcttatccccaccgcaacacacaataactcacagttagagggtccagatgggaggagcggggcgagctggggaccatgaagaacactattgacaggacagagactggtgccccacaccagctggtcccacttggaatacttttttctactctgctgtagctactcacataaaacgaatggatttgctcttacccccaagttctctaggtgggttttagctgcagagatggaaatttacactctccgagggagagaaactgtgagattgtaaaatgtcattgcagtgttgggtcccgaggtcaaccgtgttcattcactgcagtcgtgggaacattctcacttctttcttctgggcagctcagtgaggctgtaaaagtggcctgagatgttgtgactcatgtctgggtggctgagggctgccaacagtcaggtcagatgttgtatagtttgcattttttgatagaaagaggagactcaaaactcgaggttggataagagagaacaaattcatgggaggctacagagatatctcctgaatctacaagccccttgcaaatgaattctggaaggaggaggaaccagtctttctgcaaacctgaagagctggagtcataattctgcaggtggtagcaactgtaggcacattctctgtgcatttgtcttcgtgtgacatttggacctttaatgtccccccacgttaaactcttggtcactagctattagagggtgacagacccagtggagggaagttataccacaggagctatgtccctaaagaggatattgacacccctgtatctttttttctttgtttcctggccaaatggagtgagcagttctcttccaccctgtgaccccccaaccatgctgttctgcctcaacacagacaccaaaaccgtggcaccaaataggcatagaggaacattttgagccagaacaaagttctcctccttatatgttgctttttttcccaggtattttgtcacagtgatggaaatgctggttagcctccccacagcacccacatcacaaatgcaattggaactggacctagagaaagcacgggcgcaaaggaaagtcagtttctaggaaagcgtgtctgcctctgaggcatgtggtgtgatgggaggaaatggaagggactggtgttgtgaaggccaaaaagaggcatgaatggaaaagaggggtctttgatcatttgagggaagagacccagcccctgcctggggcacagcctctctgtggatgccagggagcaggtggtgtgtcttctgaccacaaaactaaaaggggtgtgattttaactatttcaagttaacagtgagattgaaacttcgttctaagtcactgactgccccacttccaagtagcttgaaggaaatatattttcaggtgaattttacatagctctagtgttccatctctatgcctagggatgccacatttcaaagttactttgtgaaacatatttggtcacatatacttcatatgtaaggaagatctggctgacattctgaaactgagccattttgattgattattgagtgattgagtgattgattggctgaagatgtccttgaactcctgattttcctacctctgcctactagttgctggtcaagacatgagccactaagtttagacaagaaattctaacagagttgaagtcccaagtttgaggcccattatgggctccttttggaatgtgattttattttttgaaggctgaagaagtagactgatttttctaagtattctctccctctccctctccctctccctctccctctccctctccctctccctctccctctccctctccctctccctctccctctccctctccctccccctccccctccccctccccctccccctccccctccccctccccctccccctccccctccccctccccctccccccctctctctcccacctccctggtgtgtgtgtgtgtgtgtgtgtgtgtgtgtgtgtgtgtgtttgtgtgtgttggtttctgggaatttttctagctggttcttgcatgagctttccctggtctctctcgatgtacaggggatagttgtttgcccagactagcatcttggcttggagaagcagggagaacacatgaataccctctaaaggaagtgttcagcttctccattgaatgggtcctggtgcacgggagcatgggaagtttctttttcagcttttgtaaatagagccatgaatatcaggtaaagaacagctcttccagctgctaggtcctctctgctcatggatccagaagcccttggtggaaatgtataacatgcttcttgagactggtcacttagctgaagaatttgcctgctgactaggctcatgaatgaatcagcagaggcgacacagagcttgcttctcccaatgatctctgaacaccatctctgagtaattatgccaactgccctcctttgatggtggcaacagattccaatctggggatgctgctattgaggacaaaattttgagaaacaatggagatgttgctgggcacataactggaaccccattctacagacccataaagatctgtcctgggagacttggggaatgcagacatggagggaagcagacaggagctgagggattggaagaaatggtactattgccaaataaattccagataatgctcccaggccctagggtaaaatttcctttgagccttctacaaggtcctaatgatgaccattcatctgtctgatatatggaaaaaaatcatatagaaagctcagactcatttttttctgagtttaaaaccagacttaaaaaaaagatggaaaggtattgtccttgtcatgacagtaacttgtgggggattgtaaccccagtttatgcaagtgctggggcccttattcataaacctcagtgggtcctcacgagtctcacagggacgcagtccaaacaacttcacgggatctcccctgcaacctcatgcagacaatatacattcattctgtattttgcgaaatctttccctccaaccccttccatgtacaactggaattaagcaaacagtcacttgttggcaaaaaaaaaaaaaaaaaaaaaaaagcttttaaatagattaccaccacgtgagtcttctagcttgcctcgggctaccagttaaaggcctcctataatgaattgaaaagctaggtggactaaataagggtcctgcctacatttgacagtgaagaatgagccctcacagcctctcagcagctgccatcattgttcccacagcccttgaagctgattctgaaatgaacgccaatttctgcacaaatccataaattacgagaggagccgtgagttttccctattaatgtcaggctgctcgtttgacttgtagcttctggccttcacacatcatattaatgtgttatttattggaacattgtaataaataaagatttgtttacttttatactccatgatgaatgttgggtgctatgaaatattattcttagcaaggcctgccaggaaaaattcgccctcagtgtgttgcagagctgagactagacatagcaacttacgtaaaattaccaaccatctaatcatgagttttcctctcatctttaccaacacttgtgctttattcactatattttgagactatagatgtcgtggcatagctgaacaagccataggcccttccattcctttcttctctctgtgaaggatattttaagaaggtgggcatgacttcggacacacaatggaagatttaaagaacccacatttacttagcctttataatggacacagaagggagcggtctctcttcacctgcttactctcactgtcaagtctgttccttccctggcatcagttcctacttcttccatattctggtcttgggtactcaacaacactggattgttggactttccattggtagacagccactgttggatgcaccgggccacacagcttgtaagccattctaataaatctgttactatctatctatctatctatctatctatctatctatctatctatctatcatctgtctacctgtcatctatctgtctatctatctacctatctatctatctatctatctatctatctatctatctatatctgaatctacacatatatagatatagacacacacatatagatacaaatcaggtataaatttgccttggttatggtgtctatattagtcaaggttctctagaggaacacaactgatagaacgaatgaatgtatgtatagatgtatattgattagttgattcattcattctatctgttgtgttcctctagagaaccctgattaaaaagaattaaaaaaataattaggggcacattgttgctgagggtttgagtccatgaccatcatggtggggagcatggcaggcaggcaagcaggaatggggctggagcagtagctgaggtcttacatctgatccataaatgggagttagagatagttaactgggcctggcatgggcttttaaaacctcacagcctaccccagtgactcacttcttccaacaaggccacacctcctaatccttcccaaacagtttcactgatggggaccaaacagtcgaatatatgagcccagggcagtggtctggtggggtccattctcattcagaggaccacataccacagctgggtggctgtatccatctcaagccttctcacatggctgtatcaggccttagtctttcatgatgtgcaatctcactgcctccagggtgagcaatccacaggagaaagagaaagtgccctggaggcagaagcttgtctgtctttggttatttaatcttggaagtcctccatcatgtctgccgtatttgttgttagaaacaagtaagagtcagatttcataagagtgagtcccaggatacaagggacgtggagttagaattcacttccaaagctctgtttccgacttccctgcaatgacttgtgtattgcccagagttctgcccttaataaaaatttccctttgctggtgtctgagtatgggcccttgcctcaccaaagctgtgtctcctaggtaaacagtgggaaagcaaagagagatatttccttgttaacctatgagactcatgcaaaactgcctgagaagacaagtgttgcagtgcctggggcattgcgagatctaggtgatcatgcgggcgatagtgcagatactggtggtgccaatgtcaacagtgaaccgtaaagaagtccattcaatctcctccctattgaacctatgcatgagagtatgtaacactgcatatggtctgttttacctattgtagtgtggacccttccatgctgcagatagacctgaggcctccctgtcttccagagtgggtaagagttcaggacatttctccactggttctgatgtctatacagtttcgaagaatcatgcctgactcacaggtatgtgtgcagtctggaatattcatttacagccaaaactgttatctcacctttttttagaggttgaacgatatataagtgatgaaaacctctctctgaagatgggacagtctttccatacagttgacctctagcactgatcatatgaacccaaggtctgggtttggagaactatggggaaacaaaaagaatctaaaacagggcaggaggggaggtttgaggaagaaggttgggctgcagttttgaaacagggaaacttatctgtctcaccctctctgttcctcagtgcagtatctatctgcctccccatgaccctctaatccaccccgttttgaaattttgcccaccttgtccactccagggatcaagactagacagggagcagccagctgagaaaggagaggattgttctattctgtttctctctctctctctctctctctctctctctctctctctctctctctctctctctcacacacacacacacacacacacacacacacacacacacacactcagtggaaaacatacttctagtttgaattttaacctttcccctgagctaatgaggtggtatttctatagctgacgctctgtctggctgtgtgctcacagaggcaattgctgctgtgtagtgtgctgtgtcgctggattgagctgaggcagaggattggggtggtgccgcacgcattaagggcatactcaatttcccatatcttcagtgcgcaactgctttactggtacttcacccccattgtcagttgaagactctgtgtaagcctggaggcattttctccttcatgagaaaatgctggtgacgttgatggatttcagaatgttgacattaagggcagcttataaacaaagtcattaaactattctgaatgcacaacgtgtgccaagtaggttctagtgtcaggacgcagcagttgacaaatacatattcccggccttgtgtcactgggtctctgcagaagaaacgctgtttcaaagaagcctaatgatgcagtgagagcccacccagagtctgatctgactccacccttccctttcccgggtccttacctgaggctccacacaacctcgggtatgttagagcagggcagagactagggcagcctttactgtgcctgtgcggtcggatgatgttttgcctactgaatgttcccacccagttttgctcattctttggtgctctgagactgcttggccagtgtgcctgcatctgaaggttaaagccagtgtgtgtcttcgtgaaaggccatctaaattagcaagctaagggccggtccatggagctctgatacaaagttaaccctttgtgcaaaaggaaacccagagatgggttgtggttggtcctctggccagctacctactcttactaatccagttctttccggctcatatcctggacttcctttcttgtgatctcacccagctgcaagggagatagttcatgtacgaacagctcagaaagaatcattctttatccagccgaaagtcaagggcttgatcgacagggacaaaggggagagctgtgcggtaacttgctgtcataacttgggctatgcttaataggctgtctctggcttctagatggagcccagcacttgacaattaattacacataaagatccatgaatggcctcacacactccagaaccctggagatgagatatgaaaggcactggtattccaaattgagcgggggtgggggtggggtgggggggtggggggggagtgggggttgctcagaggggtcctgttcttcccaaaagccattagagcagacaggggaatcttccccctcaagataaaccctctgtggagccttcatgaccactgggctcctagcttctgctgagggagccccttcccacggggcggccgcacgacaatccatgactggatgtgttatcttggtgagggctacatagattttctagctcatttcctatttatgaaagatcagggaacctccagttttagagggaagtatttttaaaacttaaactgaaattcgcacatgaaactaactcctcgctccgaatgaacaaggtagtagaccttagaactcctcccctgtatgcaagcacttctgcccagttcacaaacactctcaaagggaaactccacgtccattaagccccatgctttctgtttctgcctccttatagtgccataaaacaccttctgcctgcatccacagcctattctgggtgtcccatataaatgaggtgatggagaggatgtcctctgtgtctgtcacctagcatgaaggctttccaggttctcccacactgacacaagtatggacgcatcactccttttttttttttttttttttcaaaacagggtttctctgtgtagccatggccgtcctagaactcactttgtagaccaggctggcctcgaattcagaaatccacctgcctctgcctcccaagtgctgggattaaaggcatttgccaccaccgcctggcgtatcgctccttttttgtgactgaataatattctagtgtacggctgaagtgtttcagttcaccatctctttgacaactcatttctcacagaatggagccttagctttgtgtttccggtcagctctgcatggccacaaacccaccaggctctcgcaagacccaagtcaagacttcctttcttcccctctgttctttctccttgggagttcccaacacttgagcccacagccttgtgcaaggtaggcaagcctcctgctgtgaagttacaccctggcctatttgacaacaaggactcataggctcatagatttgaaggcttgttcaccagggagtggcactatttgaaaggactaggaggtatggccttgttggaggaagtatgtcactgggggttgccatagttggcctctgactgactctgtagcccagacaggcactggacttgatcctcctgtctcagcctccaacatggggggggggggggttggcttatttaccagacccatttcctcttttcttaccttttatatttttggcgtggatctgagtccagagggcacctgctaagatttccaggttcttgtatctcagcaacagagaactgaaccagggacactcagcagtgactgacttagagactaatttttaagatgagaaaagaaactcccccaaaatagtagcaggctcctaaggctgggcagggaggctggggttgcaaatgccttgctcctcagctgcagggcccttactaaggttactgtgtggcactgccttctcccatggtgtgtggtatttctggaatattcttttttgttacatgtagccttccacccatggagttttaaatcttgcttctgtcttagccattgagctatttctgtgaagagataccagaatcacagcaactcttataaaagaaaccatttaactggggcttccacacagtttcggaggtttagtccattatcatggtgggaatcatggtggcatgcaggcagacatggtgctggagagggagctgaaagttctacatccggattctcaggcagcaggaaaaagagagacaccgggcttgggttgggtttttcaaatctcaaagcccacccccagtgacatacttcctccaacaaggccacacctcctagtcctttcaaatagtgccactccctggtgaacaagccttcaaatctatgagcctatgaggaccactcttattcaaaccactacatgctctgacaacccataatcttgatgtctccctccacctctctccagccccttacccctctctctttatttttttttaaatagaactcccttcatgtttaaaagaaattgtgtatgtgtgtgtcagggtgatagggtggtgcatgctctggtacatgcagaggtcagaagacatctttgttagtcagttctctccttccacctggtgggtcctaggagtggagttcatgaggtgtagctacaagtgccttcttgccagccctccctccatctatttctgtgttgcttggggccttggctgctctgaggccagcctcatctcacctgagaatgccgttggcttttggcaaaggctctgacatccacattctgttccttccctgatggcaacaatcacattaacttcagaacagcactgcacagcaaagcagtgcagaattttttgttccccctagaaaacaaacaagctgccagttcagcatgttccaccccaccccacccccatccctgtggcaaagtgctgccatggaatgaaagaaaagagtgtttcagagtcgaagaatacacagatcactaccctcctggaagtcctgtggcactactgtgtgccaggcacgataaatgatcagtggaggagagaggtgctacccagagctgatggagatagcctgggtccacactcagcagccctgggttcacacccaacagccctgctcagaaagtcctgttcggatttagtttgcatagaaaccaaatctcattccttccgctgctttcattcagtcatccagcacaaacaaaaggtcacacgtgggagtctgtgtgggtggggtgggattttccctctcggtcctcctgtctccatgatgggagggggcagtgaagaacttcagcaaaaggagagagcgcattaagaccaaggattgaatgagtgcagaagagtggaggggatgtctatagagagaggaatttgggtgtcagggcttcaagactaaacagggttttcttggaggaggaaatagaagaaacattgatggggggaggggaggcagcatgaatgaagtggctgcagagagcagaaaggagcccccagtgcatcatccgttaaaccttagcatattcattacaacgagcatctttcttcgtgggtgttgagtcagcacaaaccagatcccatgtaaatgagcttggtcaagaggtgacaaggtttctgcctagccagaggtcaaagcagcctccctcctggtctcactctgccagtctggtgctgctgtgcgctgctatgctctgtgtagtgggactgtgcccctccacctgtggtccacagggaacatgggaacatggactacctcgtccatcatgttctgcatcagatcccatggaagggcactgatggtcaccctgggtccctgggccatagccaatcctgctggttaggaatagatatgtcttctttctgtcctgcttacctgaaagccctattatatgtcagcccgaagacaagactacatttagcagctaggagagaccacaaggcctacttctggacgtggagatacttaccacgtagccgcttcagcaaagccccacagcagtggggatagggctgggtgttatatacactacatataattgtttggcccttgctcacttttctcttttttcctaatagggagacgacagaaccttacctcctcctactgtcaagatgaagaatatagattcttcatctactggagattcagcagctgtttgggtatgtggagtcatctagggaaaggcaagttccagatggtagatcagaaagacaagtgcctgatcatatcctggggctgtcccaccgcccacacggtcagtgccagacttctccctaacttaagtcatcactgcttttgttcagtcatgggcaggctgacccaataagaggtgggagtgagaggcacaagaaggagaagggaaggggagaggcccgggaaggggtgctattagataagaatattacacgtctacaataaaggcctttgctggtactgactaatggacttcattttcaaccactaacctgaacctttaagctcaccaaatgctgcgatgagggtattcacgggagcgtgcctggccaccgtttacacggcctgagtttacgcgggttacaggcccatcttcaaggccactaggttgggagcccagttccaaaccctagtttcttggattcaaggacaaccccttctacctccaccccacctacactcaagatgctatgcagatgtgaaagccagagagtggtcttctcagagctgtggctttgggtcactgcaaaagtaaaagaagccattcagagaaggccgggaaacctggggatgggggtgggggtaaccagggagaatgaatggagatttcaaggcctagaaagcaggggctgggtgggggaggggagggtgaccctcagggcccacagtgcttccccaggcacctcctctcaggcctggagtcagagtggccttgcttaggtaagaactaaaactctcttttccactaaaagccctcaacgattaataggaatgaattttggcaaaatcagattagatggaatccaaccatctgccagccaccccacacagcaagtgtgatttcctctcagtgcaattaaaacagagttcttgagagaagtatgccttggaggtacattcgagggagtcattagggccattatgaacaatgagaactgaaaattaagctaatattgctaaggactcatctagaggttaagatgctgttgtctcagagaagaggatccatgccatctcaaggcagtctgcatccgaccaaggaggttctagatgttcttttaaaaagatagttttgacagattagcctatacaatttggtacttatatcatgtcatgggaaggcattgcgagatattggttataactgagagaagctgcccacatgcttatctgtcagtcccaagtaagagttgcaactgccctcttagaaactgggttactttacttttttcctgtttcaaaactacagtctgtcttcactgagccagagatgcctaacctgaacaataacctcagaccagagctatggtgtctgcagggctaaaggaaacccggaacactgactggtgggcgatgtcctggttgatagtgagctcctaacgctgtaactcatccataggccaacaaaaccgcgagttacacacaacaaggggcagctacagcatccaaatggggtatttgattaagataaaaatctcattatgtagtctaggctgaccttgaactcacaaacctctggcctttctctctccaatacttatataggtgtgtagtaccatgcctagcttctgccatttaactggatgtcattgttcctcaaagtgccacgtatccatttccttgatgctgcgttggagggtgctgcttgtaggtgtggctccctctcttttggctgagctcaccctgatcccagctacttaccgccaagctgtgtctagggtcacagaggctgccaggtcaggtacctggtcaccatggcctcctgagccttggccaacatgccccaccctgtttctgtctgacgggaactccttggagtcctggccagtcagcctcttctgccttcttgaaacctccagcccttggctgtgagccctggctttcttggttctcctccaggctcactggccaagggtccaaaccgccttgctcatctttcatctctatgtgtctctcccctccaggccgggcctttagatcaccacctctgaaatcttcaacacaaacctactcctggcatttaaagtctaccaacatctttataagcatctccacgtgacatctgataggcaaagccaaacagcagcggaaacggagccggtgttcttgatgtcttcctcacttggactgtctcctccctcaactccctcaaccttcctcctcttagcaggtggcaccactctgctcctcaaccctaaagtccaagagttctgttggagtaatctgtacctaccactgggctacccaacccatcccacacctctgactgcacacattgcttggattccatcaccctcatcagacccaaagtggaggtgaccagactcccatgtgctctgcttttagcaagtgttatccttggaaaattccaatcagacccctccactctcatataatccagcctgtctcatgctatcttattccagcaggcacagcagcccagccccttccttgcctccttccccagccccaggcctgtctcagcagcccactcatctcaatggctttgactttattagcaatttttcacactgaccacatcatgatctcgagttcgtcctgtgtgcttattttctgtcctatcccttgagaatacaagcttcctgagcacaggggaccttccctcccgaccccaccccctgctgtttcccaaggctcagcatcagagcctggcatctggaccacatttgttgagtctgtgaatgactgaactccacacttcctgtcctttgctctcagtacgctgccattgtcttcactactgtccgcattgttaaataaccgtttgtggtcgtgcattttattcataggctctgaattttaacaagaggttacctctttagtgtgcaagtcgtctctttgagcctagacttttggttgtggcccgtgactcaaatactatactggtaggaaaactttcaacagcaaaccacacacattgtcagaggccagctttgacctgctcagtggtataagagaacagagacactcaccacagttacagaccctggagttagcttttcattttcatacagaggaaggaactaccattgtctggattttgcaaatgggccaagtatatcggtcttttaatgataaccagttatggtttgtattgaaaagccctcccctcatatattttgctgttctcggaagtctgggcagactgtgctagatagcctgctcaaacaacacgatgtcctggaggagctggactggtgtttggaggctttagaggacaatgtacttgcaagctgttgccaaggccaaatcctccgtctccttaggactgaacattctcaaccttcctagccctgctactcctttaataagctcctcatgttgtggggagccccaactggagattatttccattgctacttcataactggagttttgctactgttatgaattataatataaatatctgtgatttccaatggtcttggttgtcccctgggaaagggtcatttgaccctcagaggggtcttgacctatgaatggatgagtttcttcccttgcccctgtacccccaaattctctctcctccctgcctatactgttagcttttccctaacctgtttaagagactctctggcacacatatctgctcttacgtatgctgtgttaagattctctgatatactgaaatgtacgtttcaaaagtgaaacctctgctttttttttttttttttttttttttttttggacagtgctgacttttgggggcagggaggggtgggcaaagatatcaacaatcacagcaaccctacctggcctcaccagaggctgctcagtggtacatgggttccgctttctctggagtacttctcatagttcaaaaaagcttgaagctgcggaagacagccccgccctctgcatcattcaaaagaaaactcagacatagaggcgggctcttggttcttgcatggaaacgttcaggattctttcaaagttagagaaccataactttgttttttactccttggttcttttattcatgtgatttagcctagcaagactaagtcacacatgctaacagccagctcagaatagatataatgattttagatcaaaactctgtgcagaaaaaaaaaaatcatggactgaaataggggatatcagggccaagcaaactcagatgccttaaggaaatagcaaaaatgggttcttccctcttctgtggacggccagcgtgttacagcacccgtgtgcatgtgagatctctgccttttattttcagttacccccaagtctcctaaccaaagcgtctcctccctgatgagggtgatcactggctacaagcctggggcttccacacccaaggtctgggaagctgctctttccggaagggtggtagagaccctgggaaccagaccaggcgggctcacaaagtatgaagagaatgtcgggagaggaagtggtggctctgagtcagcacgagtcatctggttccagtgacaatgaagactgaggtgtctgctttgcagtttttttttttcttttcttgtctttttttttttttttcctaatcatgtggacatctctgagaatgaggggactgggtgactttgcagtgtctgctttctaagtttcaaagtgactttccaggcaagctgcgcatatcttgggatcttcacagcacagtggctgggaaggcaggcggacccgtctatcagcttctccctggtgagtactctcagtcaaagatgttttccgtgcacctctgagctgtgacagctgctgtgttctggggtagacactgcttctcccagactttgaaggttttgtgaggtcagaaaagtggctccctctgcctccagcccacctgttgtgtctgttgcgggactcttggaggaagtttctgagctgtgccttgtggatggtggctgtgtgttatgctgtctcagaggagagcgtgaggcttgcctgggaaggaagccaccacggattcctagctagaagctaaagtgaaggtcagagacggaggtgggtgagtttgtgttaactgggcactgaggttgaactagtttccgctcctaagaagcagaaggaagagccaaccccgggggcagcttctggtctctgactcaggcagccaggcctgagctgtccagcttcagggcaagaagtatggcagcgaggcagaattttgtcttttctctgaacacgctacatcccgtgcttccctttaacgctccaggtggaaaatgtgttcaaaagcagaaagaaaagccacaggctagggaccaggaagggcatggtggaagatgggggaagggagtgggctgagttactgctattcttacaaacatctttactgtcaaataaacagttacagtaactgctgtgccacttttaaagcaaatctaaaaagcggtcatttgcttaaaaagctgcatagcaggctgcagggaagacaggagcctgttctgagcaactcactggggcgtgtggggcttcccgggttaagaatgagtcagcaacctaactgaatgagccctgagagcagctccattcactctgagcgtaacaggagtttgccggctcgggtctttgcatgatatcagcattgcctggccctctgtgaagaggatagtcacacacgttcagctttctcctggaatgtacctgagaggtctcttggctgtctccttgtcaggaatactgtgttcggcttcttcagcatgcctgggctgatgacaatcattttgggtcctgcccctgaccgagcacagagtttgttaaacgaactctggggtgcaggaaggaccagggtagtctagagccgcagtcgcaccccaccctttgaaatagttcacacccttatgattgggagaatcgggtgagacatgaattttgaagctggcttccacaagaggcaggcactaacttggcttaaataaatcagagtgcaagcttcagagaaagaaagcctccaaatacctttgagaagaattcctatcctagagcagttctatacacggaacccaaggagtcgccaaaggcttcacaggtcaacacagggtttgaatcttttcctggctagttctgtggctctgcctgaagattgtttatctgtgtttagataactgtgggtgggtcccagctctctggggccacaccctgaagccacaaaacttggatagcaagattaagattggattagaagggaggccagtgggccccaggtcctgctgacccacttctggagaccttggacttctagatcattgttcatctacccccgcgcaaggggcccaaggagttagcacctgccaggaattcaggaaagggcctggatggaggcaggactccagtatcttacctctccctggtccacttagtttccagtcctctgaaggcacatagtttgcatgtttgtagttggccacaggacttttacagaaagtgattgacaagccagaggtagccaatagagagagcccatcattcctagttggtttggtgctcttggtaagtaagctgtccaagtaaccagagaaatgccacgtcatgggatcaagaattgtggcacagtatgtctgtgggctgagcacacttacatgggttcccatgtcgtcacatatatgcaggtcacagcagtgagcctatcgctgggttttgtgtcttcaaacctcatgtgaggattgctggattatggcttggtggtgttgtgttttgttttaggcattgattttgatccgtcatatagaggtcaggcagtcatgtggattctgacagccaatggcctcttaccataagaaatagcagggatggactgacgggtctcttaagtaattagaagagagttattgaacaaggcaggaaaaagactaaggacaagtgtgaaaacgggtgcccgaaaccacagtttgtgcattgagggggtggctccatggtaagtaaagagcgtgacgtgcaagcagcaggacctgagttcagactaccaggacccagggaaagatgtacacggttacctttgtaacctagcactgtgacaaacagaaagtgcttcagacttgatgacagtggaagttgcccagaatcctgctgtcatggtaggctcaacctgggactaacctgggacttgtggccctgtctcctcttgtcttcatcatcatgggatatctgccctgagacattttgtgcagaggtctccacagcacaaactctgtctgcttctggtggaagtgctgtgagagcttgaaggtcctgcctggtgtcctgccttcctcactgtggaggaagagtgagactcttatgactgtgaaccttgggaagaccttggggtatataccagttgccaggagatactgtcaccaggacaggtatgtcctcagagatgtcaccagcctcttgcatctgttctgggctccctagccctgtggtatttcatcaagaatggatactgtccttgaaacaaggtctctttgaggtctcaatctatagcaggctctgcactcaccagggtcatgcttattaggcaaatggagactgcttcttggtcctctcaggaaactgggttttagctgtcattatcactctaaccttcctcatcctccccatctccctccccatccccctcctccccttcctcctcctcctcctcctcctcattattatcaacattattgttatcaccataaccttcctcttcctctccatcttcctccccaccccctcctccccatcttcctcatcatcatcattattatcaacatcattgttatcactataaccttcctcgtcctcctccccttcctcctcctcattgttattatcaacaacattacaaaagtacagttcccattttattcagcccaaccacacttcatgggcccttcatttaactccacaacagccctcaggaccaaaggaagggggcagttacttgccttactcagtgtctcagtgaaggtgccagagagacactacccatccattcagcacaggaaaatgagcaggagcaggcagccaatagggcttcctgtgtaatacgcagggccatctgggccaaaggtcaggaaacccaggcccctgagacatgggcctgctgaaggtggcacaacttgatttggtgctgttgttttccagctgaatccagtgacaattgtcccttaactcatttagattcttgctacttgaaagtgattgtgaatggaagacacatcatactgaaaacattaaataagcccccagagacccaaatgaagcagtgtggcatttccttaccaactccaaagtctcaaaagccagccacattctcgtgcccaccctcgggggccagaaggagctagggtcattttggtctttgagctgtcagtcctgtgtgcagtgtttaagctccaggagctgagactggcctggctgtgttagagcattgtggatgtaatgtgtgtgtcttagttagggttttactgctgtgagcagacaccatgaccaatgcaagtcttataaaggacaacatttaattggggctggcttacaggttcagggtttcagtccattatcatcaaggcaggaacatggcagcatccaggcaggcatggtgcaggaggagctgagagttctataacttcaactgaagactgctagcaaaatactggctttcaggcagctaggatgagggtcttaaagcccacacccacagtgacacacctactccaacaaggccacacctactccaacagagccacacactctcatagtgccacttcctgggtcaagcatatacaaaccatcacaatgtggttggcacagtcgtgggtccccaaagctactctaatagcaggaacctgagggcccttctctgggtcaagggcagggatcctcacaggttctggctggatcctggttctcaaagaagagacagcaagtttgaaggaaactggttcacaggaaggagaggggagccagtgatcagctggtctcataggattctttctgatgaaaagctggttgtcctttgtatagcttgagaagtgagagaggcagtatctctaatctagcttgggttcccagcttatcttttgctttctaggttgagtacatgcaaatggggacttctgggacaggaggggcagggtgttactctgccctgggaaaatgcataatgttaaaggtagagaacttttgttaatggtggcagaagacatatattcccattgcactagtaatttacagtgtatgagggctgcacagactcctggcaattcagctggacataaagcaacatttattaaatatcagtggctcccaaaggagccaagctcacttgctctcaaacggctaacgggttctgttctcacagttgtactgttcttgggcaggaagtgattcgtcctgggagagccaacaaggcaggcggctcttccactgctcggttccgtcatccgtagcactggtgtcccttctccaacttgtcttatagtttcaggaaggctgctgaagctctgggaatcatcattgcattgacaggaggaagtggggaggggaaaaagttaatcttatgggtgtcagcatcctttaaggtttccctaaaatcctcagcaaacatgctcgactgaattttactgtcactgtctacaaatgcataggtgaaagaagatggggggggggtgagactccccaaaacagggctcacaaaaagaggacaagggctcctgtcgcattcatatcatatggctctctctggccccagaggtgatggggacccacctatttcaggtcctctggggttaatcaggtaatttcaaataaatagagcccctggccttagggccatacctcttttgatgctctaagaaaagtcacctttgctgggcatggtggtgcacatctttaatcccagcactcgggaggcagaggcaggtggatttctgagttcaaggccagcctgggctacaaaatgagttccaggacagccagggctacacagagaaaccctgtcttgaaaaaaaaaaaagaaagaaagaaagaaagaaaagtcacctttgtttccatgctgggcaccagcctggcctctgaaaccagcttcttggctgccatctgtgaccaggtgccctgtcctgacttgggaacaagcttcaggagggaaggctccctggtgtgtcttcctggaggaaggaagcccagcttggaggagtctgagctgctgttccaaagttgcatggaggtcaagtcactcagggaggatgcttcccgtctcccaggctcctggggcacctacactacgcaaccatctcgcattcctcagtcaccaaatgagaagggcctcacctacgctttgcagactgtcagtggggaggaggttccttccttctgtcctctgcatcctcctcatctgatgctgtgggatgatgacagatagactctgtcacacgcagtgttttgtgagtctgagactggatgtacaaggagcccagaacagaaccaggcaccaagcacctccctcatgaacagagcaaggcttcactgtgaagtttaggttgacctcaaactcatgatcctcctgcctcctcctcaggtgctgggagtaaaggcaggggccaccatacagctccttcattaggtaaacaagtgctcaatagctatacagataaaacgatctgctcttcatatattctgcccaaaaagcttcctgctgctttctgtgagaccactgtccaggttctacaaagtggatcctagacacagaggagagaatcgtttgcccctgtgcccattcacagtacagagaagctatgacatgaatgcaaatagcttgagcatttttaaaatcgtgtatagggtgcagtgcctgtggtggccagcagagggcgtcagatttcccccgagctggagttagaggtgtgttatgagttgtccagcgagagtactgagaaccaaaccccaggcttctgctagagcagtatttacccttaaccactgagccatccatctccacagccccacatgactgttgataagtctcctgccttacatccttcctcttcttcctgtgctgtcaacaacagcttctttgttgttagggacaacaacgtttcctgtaaaggctgtttcccaggctcctttgcagtcagaaagatgaagactagtagtgggcttgccagggatgctggaaagctctttaaaggactctgacatctctgatccttgactttgctgctctggactcccaagtgttccaggtactttggcttaaactttcagatcttcctcccttctctctttctgtcataatacagaggagatgtctagagctctagcagccttcttgaccttaaaaaaaaaagtatgtttgtcttcgtacaatgatgtacttcattcacactggattcatgattatgcccattgaaatatattattcatgttttctctttaatgaaaatatttggagtggaccctgccatgggctccaagcacggtaccctctaagtcttctggaatcatagcatcatccttggaaacactttgccttggggaaggaaatccaaggagcatatgatctgtggagatcagcagcatacatagcagcggccacagcaggccatgagtatataactcgcttctgccttagcaaacaggtttgaccgttagcttctgtggatgagcctcaatgcagaccctcatgttatccttggactttcagagtagacttgtccattcatgtgcatttctgagtgtgtgtgcgtgtgcgtgcgtgtgtgtgtgtgtgtgtgtgtgtgtgtctgaagacaaacttggatgtcaattcttaggtggtgtttgcttacttttcttcccccctcctcctcctcctcctcctcctcttcttgttcttcttcctccccgtcttcctcctcttcttcttcctcttcttcctcctcttcttcttctttctcttgtttctcctcttcctcctcttgtttctcctttctcctccttctttagaccagatcttactggcctggcactgaaagaccaggctgaactggctggcagtgagcccagataatctacatgtatcaccaccctagtgctaggatctacctgtgtcacctccctagtgctaggatccacctgtgtcacctcccaagtgctaggatccacctgtgtcacctccctagtgctaggatccacctgtgtcacctccctagtgctaggatccacctgtgtcacctccctagtgctaggatccacctgtgtcacctccctagtgctaggatccacctgtgtcacctccctagtgctaggatccacctgtgtcacctccctagtgctaggattccaagcgtgcaccatctcatttggcttttaacatcgattctgggaattgaactcaggtcttccagcttgcaaggcaagcactgtttcaacccaactgcccgcccagtcctgtttatatttcttcattttttttcccctgtaggatctgcctctacatacttcatccaattagtgtgtacacatctaagtctgggaaagatgtgcttctctacctctgaattctattaaatccatttcaagtgcaccccgctcttccctccctccctgtacctgattattgtggattacttcattactgggcacttcgttccaggtgtagttagatagttttaggtaacatgatgatagaaatcaggccacaggggtggagtggctgtcacccactgctatactgggggctcgtggagccactcagggctggtcccacctgggatagggaaagactaacaatcttgatactggagatatacccaccctcagacatggtgagctcaccttcctctacagccatcctcagcagggtccgatggggacagtctatgcgtgccttacccattggctgctgaccatgtggaggctcttgtctctgcctggagacaagaaaacagctcttgggtatctggtgaagtgggacagtgtattcctggggcttcttaatccctttgaggcagctttgtccaacaaaacctgcagctaccgccacactctgtctgccctgcctgatatggtgaccacactgtggccaccaggcagtggatgcgtggtcagtgtgaccaggaactgaaatgcgtgatgaatcacgtaatgacaatgtaaatatcgtattcgtgtgtggctaggagctcctgggtttgtgtatgtactttccccaacgattttccccggcatcactttcgttttccttggtttcagtttcccacagtcaaacgtgacccacagagggttaacagccataaatacgcaattcctgttttaaactgcatgcagacatgtgggtgggagcagtgtgaagaaaactcttacagacctgcttcatcctgcctagtcacaattccctctgtccagagtatccacactgtatattctacctgcctgctagcccttcagagttgccatctctgccattagattgtccagtagatagtgcttgtgtctaagtaaccttcattttacttaatattggccccagtgcacatgaactgtgatgactttattatacagtatatcgttttaactgggagacttcattaataaccatttgtctcttattttttctaagttataagttcagccttaatcacagatacactctgggaaaaacccccatgttttgggtgcttcctgaagcttcaggcatgccctgaggtcttggagtgtttcctctgaggacaggaggtctgttgtgttcttgtctgtgtgaaggaagtcattctgccatctgactagattgattataaagaagctccatgctctggtgctgtcactgttccagactcctccaaattgtccttgggggacttttagagacacaagcatccaagtagcatgtgcaggagctggccaggccctgacacacttctaggctatttaacgccatatcactgctccttcaagttctggaatttgcttctgtaaatagtccaatggcagctttctgaccactttcagatgtttctgagttatatcctgagccctggttctttaccaagaggtcctcccaactcctcggtgaggatccagctatctgcacttcagcacaactgcctttatcttgaatgctactctgagattattggtgaccatttccatctgctgggaccacagggttctcaaggtctgctcacaccctgcggggacacataaagccatgtccttactctgtatctgaggtggtgatcttttttccccaatgtctatcatccctggtttagcctagcctttgctcatgttttagtcttgtcttggctcatgttgtagtttgcttttctgttgctatgaagaacaccatgaccaatagcaacttagggggaaaagtatttatttcttcttacacctcttccggtcctttcactgaagtatcagatcagctaccatggctcaactgttctatacaagacatgaatttggaaaggcatccccttgacctctttatgaaatgaccatgtgtgtcattgaaggctggggacagagtgcgtccctaaagataatcttcaagtttgccattatccacacatttacaggtgcccttggtaacacagggattgaccatggtgcctaactgtcagtcatgggacattgcataatagcatgtgtgacagtggttatctaggcaatgggggttgggggaggaggcaggtggaaatgactcagttcaaacttcccccatgattatccttccgtctcacctccattctttcaatccccctctctccagaacagggactttggcagtcagttactgtggcagctacatttccagcttgacagaatttagagccatccaggaagagagcctctgaggtcatcttcgagggagtttctaggttgggtttataggggtggggagaccaaccttgaatgttagcagcagcattccaccgttccaccagctggggtctcaggctgcagaaaacaaaggaagctgaatacttgctttcaactctctgcttcccgagtgtgaatgcagtgcccgagtcctgctgccatgcctctccgccccgatggactgaaccctggagctgctagcccagataaagcctccatgaagtagctcttgttccaaccagaggaaagtaactaatatagcaatcctcacttttggaacacgacctttgggtaccattgccttagtcacctgtgtgcagttttatcctcaaagtttttgtggcaggtgtcttgccttcccagctggcactatctacccctttgttttattttttagtatatgcatgtgggcctgagtgtatgtgtgtgtgtgtgtgtgtgtgtgtgtgtgtgtgtgtgtatgtgtgctccgcctgggtacatgtgccttcagaagccaaaagaggacttcagaacataggtggttgtgaaccatgcagtgggcttcctttgcaaaaacagcaagtgcttttaaccccagcccacagcttgtgttaccctctgagactggactgacaactgggtggctcatctcatatccccagggcttgggggtgggggcggggtctttgaacttcactcaaagtgcctgctcacagccatgctcgaggaagggaacatgaggcccagtgtacaatgctgctacccagcatagacatggaccttctgggcgacatgaaaactcacttgtccaaacatatctcatctgctgtttatgctcaacacaaacctcacccttgctcagagctctgaacacaacagactggccagttggaggaaggacacatgaccacctctctgagatcctgtacaggcgataaagacaggcagtgctcccagctcctctcacccacccctgcctgtgtctagcctccaggataataagactcctctccctatgacaatttgctccttctggggctcaagtggaaattggtgtcaggggttgggtgtcttgctgaaataggtgtgtgtgtgtgtgtgtgtgtgtgtgtgtgtgtgcgtgcgtgtgtgtgtgtgtgtagtgtgtgtagtgtgtttaggaatggcagagagtaagagttaccactgtagccaatgcactgtaaagtccctgtccccatccctgtccctgtccacctctcctgatggaagcatggtgtcctttgggggtttcagactttgatttcatctcctgaagagagtaagagagatcagccatgatgcctaaactgtaggtagggaatcaaatttctttggaaaattgaaaagggcctctggttatggaggtggtgagaaactggtgttcctggggcacacttagtgggtcaagaatgtatgttaaaggtccattcagatttactccacacacaaaagtcacagctaatcaaactgagtgtccatgagaagtgctagcctaggggtagatgcagaattcctggtcaccttgagcctctagtgagctgcgcatacccaactttggtggattctgttttctgagactgtacgggcgcgttatttctcaggaagatggctgttgtcctggccttgggctgaggcaatctttctttgacctcagagaattgaatgaaaagctttgggatccatccaaggctgtcctaggcacacttccatccagctgtccttcctgccttacctggaaaggggccttcagagccaccatactgatttgctgctggccttcccagaagctcttgagccaagcaagaggtctctttgagcctgcaaatgaaatgaatgaagaactagaaggtcttgctttaattcatgtttttatataagactttaaaaaaaatggaactgtataaaatggtattcagactatcatagacagtttaagtggtaccggtgactgaacccagggctttgtgcatgctaggcaagtactctattaaatgagctatatcgcaaccccaagaaaagacaataaagtccctccagagaaggtagggattggataacagggaaggcatagtggccattctccagtctctagcccagtctcagggggccattgtgataagctgtatcaattaagagtcagcatcagatatgctcttggggacctgtgctccagccctgagggtgataatctgatatgaagcaccatgtgctttgtgtgagaccaaaagccaccagagtctccggggcacccagtgctatttacaaagcagatagaatcaggactatttcagtagctattgagacatgctcgcagtctgcctgctggtgtctgccccaactcacctcactggaatgcaaatagggcccgtgtgacttcctgaaggttcctcagcgcatccccaggtgacatggggttatagagaggaatccatgactagcttgtctggtgccttacagagactagactgacaggagactcagccaaggaggaacgggctctattcagcgtgaacagagtgactaaaactcttcactacgagcaactttgatcttcctgagcagggacattgaccctgacagaacaggaagcaaatgggtgcttactggaggggattgagttggtgggagagaagtgagcaggagtcacaggctgtgaggcaccaggtagagcctcagtgtatgtctgggattgactatgtctctgaaaatggatatgttcccagcagcttagaacatgtcctttttctataacagtgccattacagatctaactacctcgaacaagggcctttggagtaggatgactggtggcgttagaacctggggctcaaagaaatggctcagcggtccagagtgctggctgcttttccagaggtcctggttctattcccagcactcccatagctcacaaccatctggaattccaggagatccagcatcctcttttgaccttcctgggctccagacgttaatgtggtacacggatatatgtgcaggcaaaacacccatacaaaacaaaacaggcaggtggacatatatacccaggtcctaggaggctggagacaccgagcctcagccaaaggatcaccagaagatgagggaaaggcctggagcagacccttcccttggaaggcacacagcctggctgagcctttgcctttggcctctaaccttcagacctgagagacagatggctgctgtgcagcactgcagagcctcagacctagcgtttgatcagagcgtgtagctcgtatgtgtttcaacatgcggggggaggggtgctccgaggagtctcaggtccacttcagtgtggattagctcctcgaaggctgtctcctgacagtgagtgtgtgctgtcagcctgttagcaagaaatcttttttgaatatttaggtgaatcaaatagtcttgctgtgtctacatttttcttaaaagtaacagcaattcaagaaaaaggagccatgatttttgaaagaaagcaagggggatgggcacatgagatgacttgacaggaggaaaggaaaggaagaaatgatgtaattatataataatctcaacaaataagaattactttttaaagtggctgaataatgagaggtttgaaagtagattttggacttacatttgctaagaaaagggggggtgcgtgaaaaaaggaaaggtgtgtctcttacttatacagaacagggtatcctctggggggtcctgagcccagggctggtggctcacggcggctaatctcagagtctcgtaccatccgaactttcacccactctgccgctctcctttccctttctctgaagtccgagttcctcagggagccagtgatgcttcccccacaggggatggtttccaccgagcaagcgaggaccactctccaagggacagcagcagcagcagcagcaagataggataacttttggcttgttgcctagttgttaaaccaacatggtggagaaccctcagaaacacaggctccaacagcacattcagaaaaacaggaaccatcaattcatgagaacttgtagagaaaaatagtttaaagaaccgagaaggtgccacattatagtgaaagagtgctggtttttagaagttacagaaatgatctcgcaggccccactgaggcagttacacaagacgtaaccgcacacaaacaagggtgtttcttataatatcacagcatttacaggcaaggagctgctttctgagcatttcgtggaaagttattttagtctcgggactagccttctgccatgagtatttttcaaggatgtgaaactttgacttcaaagtcagaaggtggggagctaggactcaaggctggacgtggtctgtacagcgggtctctggtggcaggctgccagccgggtgtccccttgcactggggttcaggaatttacaggtacctgtcctcttctgaagttagggggatactcttgtggccaagcagagattgtttccaccaggggcctgcagaacatagccatttcctacataaatacttagcaagtcttttcctgtaaaatgggctgttatctaaagcacagcaaaagctgtatgtttataagattgagtgccttgctggtattctgaggtaactgctaaagagacatcaaagtatgaggcaaacgatgtcctgacaacagaggtgcccaagaagccaccactccaggatctgaggaagtcaggacagaaagcagggtagcagtgggcagcccaggagagacagatatgcccagtgctggacacaggcctggacacaggccaggcccagggcaggcaggatcctgggagaccagtggactctcaatgtctcagattcaagtacctgtgcactgaaaggtagctaagcaaaagccaggagaaaataggtcttatttttctgggtccctcagtaagtggggaaacggaaagataacctcgcataagaacgcacacacctatgaaacagactcacgatgcagaagatgggggatctaaagctctggagtgtgccagaagctgggatctgggctcacactggagccatcctgggagccaccagtcaaagaggtctttccagattgttctgcttcagagttaagtcccgcactctccggctctgagccctgagcccatgacagatccaggctcggctggcctctggaacgtacatcctgtgtaatttcaaaaaggtgtgtgcttgtttaaatgctctgtggcctctgtcttgcatctctgaatgtatgtctgatatgcatgtctgtgtgcaccttctggagccctgcttctcagcttttctggaaggagcctggaggtgaccatctcagctcagcgagccccctgcatctgtccatctcctccccactccccagcactgagattacagatgcaagccgccccacctgcctttgcacgtgggtccctcggatctgaactcaggtcttccagctgcgtagcaagcacgttgcctattgagccacctcccagccctgtttggaaacttactttttaaacatggagtctcgcacactcagttttgttgttgttgttgttgttttgggatttttgttttgttttgttttgttttacctaggctcatgcctaaagtaaccaggcccggacttggtcttaattcctttcttgatgagcctacatgagtgtcctcctgcatctgctctagggagcccctgctgaaagcagagccagcatagcctttgcaacttgcacttcccgccagtgcacaaagtaacagcggctcctgctgatttatgacacgtgctgtaaaagcaatttacatagatgaagaggcggggatagagcctgtggtaaggtaatgcctcctcccgaggtcaggcctctagatcggtgactcagggcagccaccaggaggcccgtatgtactatggaaccacagcctcgtcctgaaacatgcagtatcaagggtctccccggttaggactccaggtccctggaatgttggttacaggggtggactgttgtgtatctccttctttgtctgtcaatttcagactcccctgagaatgaggacgtgggcttctgctctggacccttctcttcccatcacacacttctactccttgcccatccccacacctcgacacttcaccttaggcaatgggagcagagacacaccgtctgaactcagggtctgcccctccatgttcaggaggtcagcatgcaaatgaatacctccttagggagaaagtgctttacaatcacacagaaagctccacaggccataaagctaccccttgcccccgctgtactctacgaagcccacagctgcaaggcttggctcatctaacatggaagcccatgaaattgggacacccacacagccacctgcagctccccccacccaccacgtgcccgcgcgctgctgggttctttgcaggccacctgttggtcggttgttctactgcagtcaggcctgcggaggtgttattggaagtcagggggcgctagtgagctatgggctgcaattctccacaaagacctacagttgggatgggactggaaagtccagatgagccaatagaaatacatactttttttttttaagctgtaagacttctcaggacctttggtcacgactcacaagtatccagacactaacacagcagagactgtgcagcagatgttagatatggctaaagtggaaccctcctccacgaatggctctgttttaaaatctcataggacctgagtttcaaagaatgtagtgtaggatgaaacatgacggctgtaaaaggcgagaagggataagttgctaggaaataaagtgacaaatagattgaagtaagtgttcaaaatgggaaagggaccaggaagatgactcactgggaaaagtgcttgttgatcaagtgtgagggcctgagtttagatacctagtgtcctcgtaaaggtggaatatatctgtgatccccagtacaaggggttagggtcaaaacaaggcagatctgcagagctgggctaactgaacaagttagttcaagtgcagtgagagaccttgtctcaataaaacagggtagagattgataactgtcagtcagcctcatccttcacctgtattaacctgcacacacacaaacacacacacacacacacacacacacacacacacacatacacatattacgtacacagttaaaaattaataaaggtaaaacggggaagaatcctacagaggaggaatgacatggtggtgtggtggcacggcagaggagaatgactggcacaactgggcacctcactcaggctgcggtgatggggagacatctgtgtcaagctttggttgccagagcctggtatgggagtctctcaccttcaggctgcacacttgggggtgcttgcaggttattgggggggggttggtgagcaaatagctttctaattaagacgttgtgggcggaattataatgaagattgtcttagtcaggatttctattcctgaacaaacatcatgaccaagaaacaagttggggaggaaagggtttatttggcttacactttccacattgctgttaatcatcaaaggatgtaagggctggaacataagcaggtcaggaagcaggaactgatgcagaggccatggagggatgtttctcactggcttgctttccctggcttgctcagccttctctcttatagaacccaagactaccagaccaggaatgccaccacccacaatgctgccccccaacccccttgatcactaattgagaaaatgccccacagctggatctcatggaggtatttccccaactgaagctcctttctctgtgataactccagcctgtgtcaagttgacacaaaactagccagaccctcagtcctcttggaactactggctttctgtgtgggactttggtgcgacagaaagagcctgtaccctgcgcttgggagacaggagaatggacgcacaggagtcacagtcccagcagaagcgacaacagagacaggtcgacttttgaaactccaggccactctggtcaggtcaatatttcaagaacccagagcagatggtaccacctgggcctccatttgtgcggatgaggctagagagggtaccatgtgtgagggctaggcttgggtggcacagtttctttcatggaagcattaagaggcttacaaagtggaagtgttataaaaatcagtgaaatatctctaagggactacccctcgattccccaagtgtatattggctgagcagccaccaataacaagtggggacacctgtgtgccagatgataccccagccaccccttcagcaagggtgttcttttgtggaacatggagacagcgtaagacaccttcgccatagctccagtctatagaggagacgaggctcactgtggtctgttgccaggatgggtgtgaagaccttaactactgctggttagcagctatagacccagacaacaccagggaaaataaaggaaataaagaacactctagttgaacccaactctttttgctgtttagaaccagcaaaattaggactgaagagatagttcagctgttaagagcactgactgctcttccagaggtcctgagttcaattcccagcaaccacatggtggctcacaaccatctgtaatgggatctgatgccctcttctggtgtgtctggtgtgtactcatatacataaaacaaataaataaatctttaaaaaaaaaaaaagaaccagcaaaattgtctccttattgagttgcatgttctagaatgtcatcccaccttacacagaagttgttcaaggaagagaatgcagatgaaaaagtcaaatacactctgtggtttcagaagtcatgagtttcactcctttgtgttcacatgtgggacaaagaacgttctggaagcattagtttttggaccaaggctcatatttgcggtgaatgcatccctaccctgtgtgcctcccacaggagtgccagcaggtccatccctaccctgtgtgcctcccacaggagtgccagcaggtccatccctaccctgcgtgtcttccacaggagtgccaggaagtccatccctaccctgtgtgccttccacaggagtgccagcaggtccatccctaccctgtgtaccttccacaggagtgccagcaggtccatccctaccctgtgtgcctcccacaggagtgtcaggaggtccatccctaccctgtgtgccccccacaggagtgccagcaggtccatccctaccctgtgtgtcttccacaggagtgccagcaggtccatccctaccctgtgtgccttccacaggagtgccaggaggtccatccctaccctgtgtgcctcccacaggagtcccagcaagtccatccctacacactgactctctacagtctttgcaaacacactgatgcccaagcactgtcgggtgcaatcctacaagcacatttgtgtgtgaagctagatccttttcaaccaaggcagtgagcaggacgctaccttggttggctgaggggctctggggcaggtgttgtagtcagtgtccatcctcaaggacaccaatagccatttgctttgccactaatctttatggctgctaacaccctggatacacctgctctgatatgaaatctgctaaaatattcctgtgtagtgattagggaataatactattcaaatactgaaaagtcatactcccaggcctcagcacactggccaggatgtagcccactggtggagccacttgcccagcttgggttaagctctggatcctgtcccatcgccaccagaaaacaattcatctcagtgcagtgagttctgatagatatgaaatgaactagacaggaatttcagtaaagatggttgatcactatggaaaagtaagacctaagcagtgaatggcttaaaggagggaggatactccagggctctcaatgatcaggagtggacagtgactctcctgtggatttgtgctcagtcagaaaagaagcagagtccagaccaggccttgagtagcaggtcaaagttatgtgcagaagtgtcccaggagggagtaacccctctgtgggctaagaaggccgtgtgccaggagggggcgctactgtctgtgtctgtctgggagtgctggaaggatcaacacactgggctgatttctgaagcacactgtgtgtgtctgaggagctactccaaaggcagagcttgaaattcaaacgtgacttccaaggcacggggatagtttgaattatcgagttagtcttttatgaagcctttcagtgtgcaagcctgcgagagttcagaagtgcagaggggttgcacagccaagttcactggttctgatagtaagaaaagtccaagtgtatctggaatgttctttctttcacctcctgtgctgcttgtttttgtcaacttgacacaaacctaaatatatctgagaagagtgggaataagtttggcctataggcaaagctgcaaggcattctctggattgatgattgatgttcgagcaccagtccacgggagtcagtgccttccttgagcaggcagtgttgagtgtactaggaaggaggctgaacaagacacaaggaatgctgttcctccgtggcctccagattcccgccccgagtttctctcttgacttcctggatgacaggcttataaaccctttcctccccaagttatattcgtattttatcacagcaacagaaatcctaagacttacagtgttcacgcccagaccacctcctggggtctttttgtgtcctgggcactgttctgaccctgtctcagtggccacgcttggttcagctgcttctttccataactccctgtggttcacttgtaccatttctgttaataactgagattctcatttctctctttttgttacaaaagcccaacctcctgtatagttagggttttgtttgttagtttgctgaacttaaaagcttggaacctgacatttctttactaaactctactttggaagatttaagtcatcacccatcacccacatctccagatgggtctggtctcctgttctcttgtttagaattcatgtcccacctgaggtcagtcctaagcagatctgacaggttaccaaatcactgaacaggtgacagaggggacgagatggaaagcagcaatctggagtgtgactacacagatgtggcccacgactggtgctgttcagagttctagggccagagccaggcttgaggtcaaagcagaagaatcctaagttcaaggccagcctggagaacttaacaagagtcagtctcaaagtaatagaatgaaacaaatagacaaacaaaactctggggctgtagttcagtggcagggtcttgtgtggtgtgcttgaagccttgagttcaatctctactaccaaataaagtaaaaataaattaaaataaaataaaataaaaaagagccagagatcttgctgaggtcttacagcctcttacctgatttcctcacttaccctgccttgatgttttaccataagaaaacaggctgggacctactttactgggtccaggaacatggacaccttttacgaaatctcctaaatcatgagttttggcaaccagttttagaatttaagttttaaacgtggagctgagagtgcggctcctggctgcaagtcactcagagacagaagcctcatatctgcttcgtcaccctgatatcctgtcctctctaccacatctgaagttcctctgctgcctggtcacactccctgtgtcttctcagtgcccccattgttctaaagctgcaaactgaaacaagtctgagacgacacattgggtgtgaccaggcccagacatctgcggtccttgcagtggttaattgcacgtgctgactgctagaaaatggttgctggtatttagtccaatgttattctgttactctgtgtgtgtgtgtgtgtaagtgtatgtacatattcatgtgagtgtgtgtatgtctgtacacatgagtacacatgagtacacatgagtatagaggacagagctcagtacaggtgtcttcctcaataactctccaccatatgtacttatttatttgtttatctactttgagataaggtctcttcctgagctaagctagctaaccaacgaactacagggatccatctgtctctctgcccctcgagcctgggttctagacaagtgctacaacacccagcttttatgtaggtgctgaggctaactgaggtccttatatttgaactacaggtcctgtaccagctaagcctcctagccagcccccaattctcttaatcacttttttgcatggtaaataccttctgatatagagctatctcacaatcacctttccaaattccattactaatctgtgtgggtgtgggtgggtgggtgcttcaataccacagtgtaagtatagcagtcagaggacaatctgcaggggttaattctcttcttctctcaccatgcgggatcaaactccggtcattgggcttgccggcaaatccttttacccactgagctaccttgcgggcccctctgtgggttttttttttaaatgtttattttataagtatggatgttttgcctgcatgtatgtaaggtatgtatccatggagcctggaagagaacactggatgccctggaactggagttacagacaatccataagcctccatgtggttctgggagttgaacccagagcctccgaagagcacaagtgctcttaattgctgagccatctctccagcctcatcccctgtttcccctaaccccacactgctagtcttgatattgctgtgaggtaatttgcaagatgagattaccacttatatcaatgggccttgatcaatcagttaggggccttcagtagaaagactaacctccaagaaaaaaatgccccagagtctcaatgtcccaccactgtgttttcctaaaccccaaaggactgggaattctcagcatttaatgcaacaccgcaggaagagtggctcctgcattaccaactcctatggctctgtagcctgctctgtagcctgctctgtagcctgctctgtagcctgctctgtagcctgctctgtaacctgctctgtagcctgctctgtaacctgctctctcatgtgggcttgaatccgcaccactgtgcaaaccagccctttaaatctaaatcactgtctgtgtctgtttgtctatctctctctcatgcacacatatgcatgtatatctcctgtgggtcctgtctctctggagaagcctgacaaatgtggtcgtcttcccagaattaacactgttctctgtgacagacagaatatgcatgggtataaaacaagagcagaggtggcctatttccctttgcaactaagttcttttacttttctctagcttatgtagaagtgcattttcctgagcatgttctaccaacttccatttaaaaactcataccaatcatccactcaggatggatggctttggtccccacaggcaggggacactttctccactagactgtgtcatcctagattttgttgtttctctcagcatctcttcactgattttattctctaatgtttaaaacccctggagttgatagcatcctaagattggcggcttgaagaaacaacatttatttacataaaatttaacatacaggtaaatatacttatacacatgtgtaaacacatttaagttcctagagattcatttgagggcagtgttttggaccactgagtttaggggaggttgcttgcttgagcacagacgggggacttagagcatcacaacttagtggccacagcactaaaacaaaacaaaacaaaacaaaacaaaacaaaacaaaacaaaaaaaacagaaaaaccgttaatcaccaacagccccagaagaatgagtagggcttgagatgaccatcctatctgtgaggaaatgttgggtacccagccttattcaggtaacccgagttgcggagagttcatgaatgcagtgaccacatcttgttgaagagacagtgtttcacggagccctcctcattgactgcctcttacattcttcctgccctttcttctccagtgttccccagacctcgaagagggtaacacttatgctccatttagggctaagctgttgacagtcacttaatcagttatgagccttggcataaagcagggggccgtttttatagatgtcctagattgtgacatttatttgtgatgaccgaaagaggtgctgcgtctaagaatattgtgaacacactaagtatgtgctgtggctgatccagggatcctcagtgtgccacgggaagtcagagaaagtgactgtgccacccaaaggtggtgagaaggtgtccggtgggacctctgtgaaagccaaactgcactccccagctcttaccaggccagtctgtccacacaggcaggaggggcctggcagctacaggcctccttgcacacatcaggaaaaggaaaccatttgagactctaagggctcagagtatgggcagactgagagcacctggtggttctgcttgccctgtggacctaatcatgtatgaagatcgtaaaccatctctgagggcaaagttgcctgacctctgcaaagcattggttccagcatccttaacagagacaaacctcactcccgtgcataagccctctctttctgagctggtcaagagtctctgtaggtttttgtcttttcaaatgtgcccacctgactggaatttctttgcactcaggctaagtcagagagagccatctttctctcctgcagctgtgagttacacccaacacttgaaaatgaaaccgagtagtaagaggggctgaggaagagtgttcctgacgggaacagaggtttgttatccagaaaatgacgtgagaagcactaggggaaacctagggcatctcgtagccaggcacacaaggtcgtgtgagctgacaatctaattattctggtcctaaactctcgaaagaaaaatcccaagccagcatttgacacagtcatgcaggaaagcccgcttctgcacctccatgccctcaatcaaatcttacaaacactactctgggctgcagattttgttttttgtctgagtggatatcacctcggatcacttgcattaactgcaggtgtgtgatgcggacaaaatgattgccctccctacttttagaacgtgccttgaatgtgaagcaaggaattgttttcccaaagcccacgggactggagatttgcagtgcagatctgcagagcctgtggctgtctgtccactcttgggggccccagctccccttggactagtgccaataagcctctgaaatggagggtatcctcttccttctgccccactccttcccagcccaggcacgtcgttgacactccatttatgtgagaagcttggcattagccgcagggcttcactcttgacacttggactaattctccactttatattcgtgattgcccttctgaaaggagaatctgctgccaatggcacctgggcatttgaaagtaaatatgatgcaaatactgcctccccggcacattccctcctcaactttgggatgaagagtgaggatgagaaggaggaggtgagctggggtgcccgactcatttgcataatggtgtttgaggctgggtgaaactgaaaccatagcctgtgtgggtggggccttgtttctcctcacagctgcccccaccccccaccccagcagccaggccccctctaggctcctacagaggcctagggatggtgaggcccagggactcagggcaccagtgcgaaaccagataaaacacctggtgctcctactggccacaggcccgctgctgagctctgtgaacaagcatgggggggggggggtgtcctttttttctgattcagattgcaatctattggtggggcccagcgtgtggcagggtgagcctttgccaggagagccaaatcattttgatcttcagtggaatgctctcccagctgagttatttttgacactgtgaggcaaggcttctctcctccagtcatttttcagtcaactggagtcttcccaatccccgtggctgaagcccacagattaagaggggacatccagctctcccgtgcgataaatggcttttctacctacttggtgtctgataaggtatcttcactcagaagtaatgtgaaagtccgacagttttacagatcctgttaccgttgctgaataacgtctccaggtggcaaagtgagttcttgtaatataaatgaagccagcgtgtttttgctactggactgatttgccctgaggacagggttttccactatggaacccatccccctgataggtgtggaagagtggaagccttttatatctatacttccttcgctctgtctttagcttgctgtgggttcatgtccttgttggtagaaagaggggatgacctctctactggagttttcacgtgtgtgtgggaggtctcagctccttttcgaattctctctgaacattctgaaatccgttgacttgtcagacattgggaacaccacgctggcttagaagagcatggcctctttgatgaaagctttcagtccggagcctctggtgatgacgttggtaaccttaaacttgttcatggccacagtggaattcatgtgggttttccttaatggcaagataacggaataactacagagcgtgtggccgtgtggatgcagctggactctggctcagaagcaagagttgcagtttcctgggtgctccgaagctggctgggaaggtcccaaggatgtggtagttcgtaggcggcaaaggccccaggaacttgcagcttaaatccatttgtacctgggacaaatgtcgtggtcctggtttccagtcttccaaggagagatcagctttgggctgtctgctttgtatttgaagatgtttttattcgaataatgagggggaaaaaagggtgctagtttgcccaggcacaggaggtttggttttctgtttgtttgtggggttttttgtttttcagtactgagggtggagcctagggcctcgctaacactgagaagcatgcaaccactgtgctatattcctgcacacctgcggctccgcaaaacattggtgtggtgctggctttggaaacctatggatgataccataagtcagaaacaggaatgtcgtatttaactaagttctaagttgtgactggttggtattattttacctataacagtttgaggtgaggggagagtggttttaaaactagaattgagctgccgtgtttatttccctagcattccccgggtggttatagtatccctgatatcttggtgacataaaaaatagtgactgcccctgacggtggcgacttcacggtttggaaggtaaacccagcacccacactcaggtttcctgaggatcacatccacgctaggctgcaggctgcacgcaaggttcaatgtgtgaatcatctcatttcacggtcacagaatccacaagaaggttccagtatgactctgtttcatagctgagagaggtaaccttcctgagatgacacagcgtgtagctggcagagcctatacatgaaggtaaacagttggatcagatttcaaagagcatgcccgtaatcaccatttcagtgcccagaagcagcaagggcagagaactcagggctctgtctatgagtgaaagcataaaaccccaaagactgttttcatcatgacactcagatagttggaaggctttaggctttgagcatagtgagagagacaaaagatgccaagacaggtggagggggcactgggtgtccctagccaccccctcagcagctctgatcagttaggaggctcgttgtcagagaataagcatcttccacaggaatcaagcccttgcttggtgctggctgtgtccagcctccctcgggctccttgtgcagcaagtgagtgctactgtggtggaatggagacttttcccttccccctttatggtcttccctggggaggagaagcagcattgggaagaggtgctgggctccgtgggggcagaaggataagtggtcagggattccatggaggaaaagacagtagctttggggagagactatccaggcaccaaccaaggctgcagccagtgtgatggacaggtgggaagggctgtccacttcggagcgaggctatgcttcagccatctttgactccttgctccctttcttttccttcttcatcttctccaacccaggatgtcttactggtgcttgccatgggcaaagtccctccccagcctgagtttctgaggcaaaaccagaatcccagtgcctcggaatggggctgcacttggagatgaaatccaggtaaaatgaaaccaatagaccaatggaccctaattcatcatgaccagtgtcctcctaagagatgaggacccaggcatgtgcagtggggacagcgcatgaagagcgggtgaggacccagcatccgctagtcaaggcgaaaccagccctgctcacaccttaagtctcagtgacagaatatctgacagaaacaatttcagatttattttgacttgtggtttcagaaattccgggccaccatcgtgttgaggggtttgcctatgagaacgtctctctgtcaccatgcaagccatggcaaactcttcgtaggaattaaatggaccctagtggctccatcaaccaggcatcacctcctgaagactccacagcctgttggtactcaaagcatgagcccgcagagatacttggcgtttagtctatggccatctcagatgtccaggcttcagactgagagtcagtgtttctgttgctgcagcctctgtgagacttaaagtccaagctgggggcagggagctctctgtacccagagccatgggctcagtgaggctctggagccctgaggtagggagaaggtccttgttagagagttgggtgctgtggatggatgggtttcttaacccgatcagtgttgactcccagaaggagctgcagttccatctgcaggtaaggttgcgatgctctgctctgattgaacagaaaacagcccaagagtgaacaagctggtctctaaggcattctgagccatactgtagattttcaggagacaggcgaagatggaggaagagctaacatgtcccctgtgtgaggtggagacttctgttgttagactgctctgttccttgccttgtctcctgagaagagaaaaagctaatgagttggctgctgtgttcagaaaccacttgtagaggaaaaacaaacaaacaaacaaacaaacaaacaaacaagggcagcccatggcacctgtagcctgacagggcccctgtggtcaaggctctgtcactaggctggcccttaacttgagtggatattggtcttattgtagagtctcagtctaatgacaaggcctttaaatttttgattgatactcagtgatgaatgaatgaaagattggggcagatcgaatgcctcctagtagagttagagttatgtctgtgaagcaaatctaaacccagaacgccaagaccatctttaaaagtatgctttaatcaaagttggagtcctgtttactttgctgagcctttccaaaacccttattatccttagttattgtgggcttcaacaaggaaccaggaacaccaggaagcttagctgtgtattttgttccatgtagaaggcagaaggcgatctacgctcaggccttctcactttctccacaggacactgagcccgaaagaaaacatgatacccagggtagaatggagttgatgtctccaaaatgactggatgaagacaatattgaaaatgagtagagagctgacagttgtgcgtgccatgtaatcaaggtcattgcctcaattgtgttttactatgccagttcgtggggctccttctatttctgaaggctgtagcttccacagtaactgcctttgtagttcttggacaactagagaaggggatcagaggatctgcctgacagcctgggaggcacttctcggtgggatttcccagtgttaaagaacagaggccccaggactgtgcactgggtttcctgggcactttggtgcatctctctgtgtctttagttgaatgtggtagactgttaagtgacacgggaacacttggttttggaaagagaaatctacatttactgctttctccaggggaggtgggaaacatgtttacttatttatttagggacagagtctcacatgccccaggctggtgtcactgtgctggcaaggatgaccttgaatttcctatctcctacctctcctttttctgggattacaggtgcatgccacagtttatgtggtgttggagagtaaacccaaggcttcctccacaccaggcagacattctagagaccaaggggcaaccccgggctggacctgtgattaggagccttgtgggaaagctgggtgtgatggcacatgctgacagtcccagaactcaggaggttaaaccaagaatggggcaggctcctgtgttatatcacatgttttattacaatattaacatatacttattaatatcatgtatttcctactcaagacagacacctatagacgactttatcatctcaggaaatcacctatcaacctttttatgtctgtttgtttgtttgtttgttttgtttgttttgggtttttgttttttgtttttgtttttcgagacagggtttctctgtgtcctggaactcactttatagaccaggctggcctcgaactcagaaatctgcctgcctctgcctcccaagtgctgcgattaaaggcgtgtgccaccatgcccagctgtttttttgtttgtttgtttgttttttcatgagatgttcacacgcatattcccatggccttgcttagagggtcttttgtttttttgagatttgtttttatttatgagattatgttgagtatgtgatagtgcatacagaggccagacgtggtggacatcctcctgtagctggaaattacaggcagttatgagtagtctggtttgggtgctgggaacccaacttgatcctttggaagggaggcagcacatgtggttacatggtaaccacagctcctttcccccccccccccccccggccctttgggtggtttttaatgttaattttctcattcacatgaaaatggaatggataaagaaacaaaaggcctttaattgtgtgggctaacaactaatgtgtctgcagacagggaaggctgcagcagagttgaaatgtgtttagtgctggtcaagacaagatagaccaaccagaataagactcaaacttggaagccagaacaaacagtctctgaataaccgagcgtgctagaggacttaaagtgacctgagtcatcacaagaacaaggaaggtcaccaaatacaacaacagttttgcttgctggctgtaattataagaattccccgcatgttcatctctgaggatgatgagagacgtgtgcacatgtgggtggggctggagagatggttcagctctcgaggaggacctgggattggtacccagcacccacacagcagctcacaacactccgtagattgagtccccagggatccaacaccctcttttgacttcatagggcatcaggcatgcacacttagatacacacaagcaaaccacccatgttcagaaaataaaacacataacctttcttttaaaaggtggcatgtgaggtcagtggtcccatgaccaccagctgtgtggcatgcccctcacttttattgtccctgagacttttgagaacataggcttggaagagcagcatgccaggctgagggaaaggctagaaggagtctcgccagggctcgtgtttgtgtgagaagtgcaggcattcccagcccttattcacctctgagcatggaaacagcgggcaccttgcgtttgtcctttccatcacccacccaatctccgaaacagatgggcggacacttaggttttcattgccttcatgagtttgccaaacaacatacaaagtcttaccagtgaggtgtatagaaatgaatactaccattcaaatgtgcagaaaacaaacacgcttgtttatctgtaaaaaaaagattattggttcatgtatggtatgtgtgtgttcagatgtgtgtacctgtgtgtggagtgtatggacatgtgtatgcctgtgcatgtgtgtgcccatgcatgcgtgtcctgatgatacctcaacgttactgtcttcctcaattgctctcaaccttattttattgaggcaggacgagtcaccagacccagagcttaagctgagcagtggtggtgcacttgggaggcagaggcaggcagatttctgagttcgagaccagcctggtctacagagcgagttccaggacagccatggctatacagagaaactctgtctcaaaaaaaaaaaaaaaaaaatcaaaaaacaaaaagagaaagaaagaaaaggaaaaacaaacaaacaaacaaaacccagaggttatcagctggctggctaggctgggcaagtcctaggagctgtcctgcctctgtctccctagctttggagggccatacctgttatttatttatttgtttttaatatgcctgtggggcaagcattccactaactgaaccttctccccatctcctttttaaaaaaaaaatctttaagatattttataattttgatgtgccaaagaattccactctttttgtttctcaactttcagaagttaataaaggcctgcctggagttggtttggtgtaaaaatataatccccttgtatttgaaaactgtgtgtgttattgtgagtaggaccgtgcatttgccacccccatgtagacttttgttctgctcttagataaaacactaataaacaggaagctgaagaaaaaaaaaaaagtgatgcgattgttctgaatgtttttctgttaagggtgtctgggccgcaccatgcagtgccattcccggcaggccctgtaggtggcggtgttgagaaagaaatgaagcagcctgagcctctccgcagctgctggcctcccgctgaggcttgggctcccggccctaaggagcccgctccacttcccagcactttcctctttatgtgtcccaaacaaagttgtaggatatcaaggaggagaagatggctgttcctgtggaaaatatatttttcttctttatttttcatgttgaataacaaggatattatatttcctcaaacccttgcatgagggtgtgtgtgtgtgtgtgtgtgtgtgtatacatgtagcagaacacaaacaatttaatagcaatatgcatccctttgtttgtttttatgacatggaattatccacaatctgagactgttgtgatttcaaaacactaagaaagtttgaagttttatttcctctatttttttaaggagtgactttaatatccacaatgaccattgcctttgtctcattatccacttcaagattaaagtctaccctcaccttcccaggccctctacctttctcgagtcctggcccctgtcagctgaggggtttggaggctcttgcctctgagagcacacagaaggtaaaaggaagtgaccctcgggtgtgtccattgtcccgtcaaagcagagccctgggctggcccttctgccttctgtggcttcccacttctctgtgagactgggacacacaacctttgcctctaggactacctaaaatggtcccacctccttgtttgtgtttttccatagctgagagaccaggaaggaaacaggggtacaggttgctggaaatgagagccgagcacacaggagctacagtctggacagatgccagtccctgccagaggcagggcacccacaacactgatgtccctgaaccattcccctggggcctcatttgaacttcgaagttccatgagcctatcaatgaagcccacacactgtcttacctatccctctcctggcttcttagtttttgtgtgggttgctaagtggaacccaatgacaaaactggaagactactatagacacttctacagggctgtgaggctgacgggaggaaacggaatgccagaggtctggctggcttgagctctgtttggttcagtaaaatattgctgttgtttatgtcaaaaagtgggagagaagccaggcagccaagcatgataacagagatctctaatgtcaagcacttgcggggctggggtagaaaggccagcctgggctctcagggagtcccaggccggcctgggctatataaccttatgagaccctgtctcacaagaacagcaagatcagaaaaacaaggtgggaaaaagaccgttggagacaccttgggctctcaatcggccatacccctagaaaaggcttctctgggttcaccctcttggggaagacctggattctgagtaagggatttttctcctaggttctgaggaaggtctcaggggtaagggtttcacagtgaagtttgtgcttacattttatgacagagatgaaaagaaaccctgtgtcctaggctccagcgtatttctttgaggacccggcatggggtcattgttcttagagtctctggctccatttcacagacacgtagcacattctacattctagggttggctatgaagacaggcagtattctcagaactatttttagcattttattttctgttcagggtcaagaacttcacccacctaagtcaggtcccactacatggaatgttccagaaagcaaaacgtccagctgcctgtcttctattctaggcctaagttatttgaattaaatcccaaagccaaattaattctacatactctgctgcttctgtgtcagggacattgattctccagttatcaggggttcttgcagatccctgcaaccacaggactccgaaaccacagggttgcggagaagatatgcagatatcctctttaatggcaatttcagttatgttcattagaaagtgtgatgctcacccccgggggccaggggctgtccatctcagtcactctaccctcccgtgggcctgctttaagtcatctttctctggggtggtggctttcacagtcatgtgagtttggtacatggctgccttgagtttagctacaatatatagtcgtggtgtgtgtgtgtgtgtgtgtgtgtgagagagagagagagagagagagagagagagagagagagaaataaaataccctctgcaaggtcctgtggaggtcaccgtccttaaggactctgccacctgcaatgtggttggacaagagtgagtgtcccagggctctttttatcgtgcagtgacaatgtagggatttctatggcagaagctcgcggggtcatttttaaactcgggtgcattgagcataatcggctaattttggcttttagtacttctgtaattgaagacagacagattgctaattcggtgtgtttgaaacttcctcaagatcgtttgagcagccttgaggccagggttggtcatactttcattttaaacatagttattttccctcggggaaatgagcaggccctgcttggtgtgtggtctggtgacttgttgatttcagagtcccacagtatggacatgaagcctggtggggacggctgctggctcacgggtcacctgactgcctttgcggagggtccagcttttgttcttatttataagaagggtgacaagaggtctttggtggtgtgcctgtgggacttagctgttggatttccagcttaactgtcaaatgcagagtctgattctctgagcttgctttcatcttgttcctaggaagaaatattagctactgcccctttttatgttcttatgtatttctattctgtatattttaccctgcacagctatgcatgacgacaggtcatttgaggcttctgaaagagaattttgttagccaacctcagctttttggtgttttggtttggttttggacaccaagtcactagtgacccaataagagagacagttcagaaattaagacgagttgacatttacctaaatctgactccgtggcctctgtggctctggtttttgtattatttcctcagacaagctgtagcattggcccaacatcagaacttttcagatccaagagcaacacggtgtggactcacttcctgtccgaactgcacggacttaccgactctgtgggctttatgatgcagaagcagtgttcaatagctcataaagtttatatctcacacaaacttacctgtgatattattaattactatttggctgcctagaaactatttttcctgtggccctgtaatacctcttgtggagtaacattgaaaaaaaaaataagtaaggaccctcataatacaaaataaatctgacttgcctttcttgtcacttacagatgggtttttaaaaagcatcttgcctttcctatcaacaaagccccccaccctcccccccgtttttgtcagttcttctatttattttgaaatactaaacaatcgacttcacttgtcctcgcggcttcttatgtcttgggggaatgactcactgatttaggctctcagtcaccaggggccaatgtcaggatccacagaaacttcctgttgtttcgaatagcttccccccaaccccctacaccctccctccttcgaggtgacagagtctagagaattcacagggcgtggggggtgggtcggaggtggcgggctgggttatttgacttctgaaatgagttttaaagtatcagatttaaaagtgtgtcacttaccaaacccaagatgtagtgtgtccctgaggtttcttggtagtgttcttgctcctgtgcttcgtgcaattagaaaaagaaaaaaaaaaaaatcaccttttggtttttagattgtaaaagcatcactcctgccagcagacctggagagggccgtggtgaacggggatttacttattgcgggacagggtagccaataaactgtcaccctctcctgtgcttagggtgttcagggtatttgttaatgttcaaaaaaaaaaaaagtgggatcacaattctgagacaccaagcgtagattacttcatagacaaagagtggaagctggagatcgagatcggcggggctggaagggaggaggtgggggagggagtgtaatggggccagcttcagtttgaaaagacaaaaatgtcctagagaaaggtgctgctgtccattgcgcagcaacgtgaatggaaacaggacactgaaggacacacagagatgtggttaaagtgctcagagtgctgtgaccattagcacagtttaaacaatgcacacacatctgtggaaattgggtgtttgaatcaccgtgtaataaaatattagctagatgtgatttgtaagaatttaccaaaacttccattcagaatggctactctgactatacacatgttgtatacactgtgggtctggttaactaagatgtgtggttttttttccccactttttttttttttttttagaaataaagtttaattttttaataataaaagaaaaaagccaggtgtggtggtaaatgcctttaattccagaactcaggaggtaaagacaaattgatctctgtgagttcaaagccaacctagtctacaaatttagttctaggacagcaaaaaaaaaaaaaaaaaaaaaaaaaaaaatcactctctagctcagagggtggtcagtgtggggttctttgcatccacttcacctgtccctaggtgggctgtttcttcttgctgggattagatcagcctaggatcccaacctttaatctagacatttctgtactgttgttgtctgcgggacaaaacttgttgttttggttgtttgctccagcctgagacaccacaatgccatcaagccaggagcctttcctcgctgatgaagttgtatttgtagtaacgctctcttgtctacagcgaaactgcggctctttcaggaggacatgaaaaacatgtcttgtagactgggtggctttatgtgaactttgaactaggtagaatctgacctgtgacttaacatttttatttgtatctttttaaaagtttttatttaggttctgaggtttgagtcctaagcctcttgcatactaggctaggaggccctctaccactgagctatacccttcttaaagagtttcagagtctcactcagcagcccaggctggctttccacctatgacctatcaaagcctgctgactagctgagctacaggcctgggccatcagccacccctccttcttatgtctattattctcttgtgtgtgtgtgtgtgtgtgtgtgtatgtgtggtatatgtgtgttgggtgttaggggtgtgtgttgggtgtgtatgtgtggtatgtatgtatgtgttaagcgtgccattttactaagagaaatacataaatgagaattaccaacgtaatcttttcttttttacaatgttggaggctgagtcgagggctttgtactcgccagggaagcactgtgtctctgagctaaatccccagtccctcctcgaggtgtctataagtggtctttattagctagagagctaaaacaccatgaaacaaagtccacacccacctctgacctgagaaaactatttcctatgccatttctaggacagcccttcagtctccaccccggcttccactcccctatgagatagtacattctagagccagagccagtatttttgtaaagcccatgtcagtggaatagacactaattatattcagctccacacaagctggtgtccctgtgaccaacaattcacattgttcctgacaggaagcactgtttgaacctaagcgatgttttgtggtagcacatggctgaccactgccagcactaacagtcctgcttcaaggtggtgacaaaatgaagaaattgcctgagtggggactgcagatgccttcacgtgtggcattgctatctgggtgacacaaaacacaacaggtttcccccacccacccacccacccacccacaaatgaggtagcatcgcaaccggcaagacagtgcatctttagatttctgacatacatcttgctggaaaagttggttcacccccatccacaggcagtttaagtattatttggggacatgtttgacttcatgtagattggagactagacatcaaacagcatctgaacacagggtgtgcaatagtgtgaactagtggctacctttgtccttagttgttgagagaaaagaagcttgtatcttctaatctgatgccaacccacccccacctcactcacccacccttactttgttcctcttataaattctttctattagggaccacacacatagacttaagaatatatagctagaaagtacgcagggacagagaatcctagtgcggggagagaaagacacaggacatagctcacaagaattaaagagggtgagctcccccggatgctgtctgagcaggaaaaagaacgagaaagtagctcgcccactcgtgaagattatacccaggaggtatatgaagaagttagcaggctcaaaagaggggtaaccagactaatggggtgaaaccaagagaataggtcctggaatgtaatatcagaaatatgcttccaaacagggggggggggggttgagtgtccagcagagtgtgaaatgggcttatcaggaaaaggaagaaaattacaaaggagggagggagggagggagggagggagagagagagagagagagagagagagagagagagagagagagagagagagagagagatgggggtgatgaggaatggggcaggcgtgttcccctgacatgacagagaaggctgaaacaaaaagctgaggaactggaagatgcaaactgggtttgtggccagagtgaagggaaatgactgatatgtgctcagagtttagccaggctggggctgctggccgaagggacagtattagtgctttagaaaattctccaagcagtcctgtagtctgggttctggagaccagccagccttctctggagcacgcgatgggggttgtggagtcacaagtacaaaagtctatagagcatcattttgaaaccctcttttgacttttcagataaattgcagaatcatcactaatcttaaaacactttccattaaaaccacacttcttaaaagggctggaaggatgccccctcctgctccccggagcctccttttgtgtgtgctcttcccccacgggcagagatttatttcattagcaggggctccctggctacatttacagtccgaggataagtcttcctggcttcctgactgccctgctgctaagactgctccaggaggccaggtagcaaagcaaccttctcgtggtgagatgggttttcccctgtggatgcctttctgcagaacagtgggaatctttctactttatttctgtaaccactttttaaatactctgcaaaataatatttgagtcaaaaaggagtctgtggctctccctgttattctctctgcaggaggttagtgtttgtgataattcccctcccatcttgcttacttcccaaacaatccctttcctttttactcctttttcttctggctgtttatcatcccatcattctactttcttatattctatgtggattatttactagaaagatgtcgcggggttaaggagacagctcggtggtagagcgcttacccagcatgtctaaagccttgggtttgatctcctgcactgaagggggaaaaaaaagagaacattatttaaaaatgaaaaaaaaaaaaagttaagcaaagccacccttcccaggcccacccttactagcctgtaggaagaaaagcagtcagagacaatgattcagacactggcattttctggaggagctcgctggagcaggatcctatcccctcctggagggtatgagcttcctgccagcctctgtggcaaaggaccagaaaagccacaaagacctgagtggcttaatggagtgcctgccacattggacccaccaggccttgcaggtgatcatggctgccattctcccaaagaggacttcaagccgaccaggaggactcaggcagagcaggccttctaactcccccaaggaaaaagacaagtgcgccacaggctgatgagataggccctgctccaaatgtcacctcccccgcatttttgatctggcacgaaatgagtgtggcctgtgtacttttgtctccttgctctctcccttcctccacccctttcttctcttggtttatctgtgtgtgtgtattgtatgtatggctgtgtacacatgcgaatgcatgtatggacagatcagcacgtcttcccagatagttctccatcatccattaccttatcatttcgaggcaggctctctcactgaacctggcactcactgactagacagtctggccagtgaacttcagggatccttttgacccaaccctcccaggataggactgaagatgtgctggaccacacctacttttttaatgtaggtgctggggatccaaacccagtctcttgtgcttgcatggcagatactttaccaactgagccatctccccagcccagttctctcttcccctctgtaacctaagctgacctggaaatcatagtcagcccagattagccttgacttctacatcctcctgtctctgctttgcaaatgctaggattggagatgtgactcatgaagccccgatgtagccctgattctagaatttcagaagcataggaacctcccctttgtactctgtccacctctggtctgttagacacagctcagtgacccagggctgtagagggcctcctggtctttctgagacatgatgtggctacagtaaatggagccattgcttgggtgcttgaagggagaggaggtaccaagcaatggagctaggggaggagtctatgggctgcctgtggctgcattctcttggagatgggggaccagtctaaagtgactttgactcaggcaacagagaaaacattgctcactctcaggtcttcctctccttgtctttctggaagagtggtcctctgcttctgccttccagatgtgggcctggcttcttggagcttgataatgtggggtgaagtacggggattctaatttccagaggagcaaggtgttcttggatgcctgccatgtgtgtcgtgtgtactctggtgatgagcctcactaatcatttccttgtagtgtgttattaaaccccctagagatgagcccttaggcctcccgtggctgactgggaaatgcaggccacacctaaggagctggaaagtggtgtaaagccagggcttcaaaacagactagatagtgcctcagagtttagttatagggcacagttctatggcctgaagccattctatgctgattcccctctctacccttaagatgggctaagtcctgaaatagctgaggctgcctcatctggacagctcctagacatgggtgtgggaatcaggaagcggggctctgggttcttttgccaggagatctgtgtcctaagaaccctgaatcaggcctttctgttggttcaaacaagcttttttttttttctttcagatagacaaatgaacagttaacaggtctgagtacacccacctttcacctcccagggccctgtgaagtttaaatgaagatgtatttttaaaaaacaaaaaacaaagcagcaaacaggagggaacttgcacactcaaagggggaatagtgctgatattgaaataacgaatctaatacgctgcttttggaaagcaggcaagagcccttgctagccagaaagctcccagcttggtcaccacggtgtgtgcttccctgggcatacaccttggactaaccctgcatgccactcagctggcgagcagatttttctaggctccatcccccagaatctttggaagaacactggattaggtatgctagactggtcctggctttgactgaagagattacacatacaaaaaaaaaaaaaaaaaaaaaaaaaaaaaaaaaaaactctgaagataaatgttatttaattggataaacaatcttagtgcagttttttcccctgtgttctatcaaggtaccactggcaaggctatcagggcagtttttgagaattttttttaaatttgagctagtgtccatatggacacatgtctcgggatgtgtgcatctctgggatagacaggtagagaagcatgtgctatgatgcttcaggtagaatacccagtgttggagaggtgagctgactatagctcagtggttctcagcctttctaatgctgcagttccattctgtgatgacctcaccaccaccaccaccatcaccataaaattatttttgtatttacttcataactgtaatttttctactgttatgaattgtgatgtaaataccggatatgcaggatatctgatatgtgacccctgtgaaagggttgtttgacccaaaaagggggttagggtccgggacccccaggttaagaactgctgctgtagtgtctgtcttggaaaggcacagtccaatcaagaagggaggtattcaaatccacagggttcaagtgtctgtgtggactgtagcatatggggcatcgagtggaatggcaaggaaatctttatagtcacaaggacagaatgaggcacatgctgcttgtgtctgtgggccttcctcagtgtttaacttaactgtcatctgctgcaaactgaccgttgttttctactggtttccttctctctagtgaggatgagtagagtacttacattacacagtgagcctgggcaagcacgagcgttcttcttaacgggcctgtctgggtcaaccttaaaatgatagttgagtcccaagctaggaaattgattcatgcgcttcgtcatgccattggtgagcccagcccacaggtactcaccctgtgccagctctgagccaagcatggcttggggaacgcacttctgacccgagccttcccatccttgaaagtcagtcttgacacttgggtgcagcatccgagacacctcaagggtaaggcatgtgtggtacttagagatgaggaccagtctcctagcaagagagacacatctctcaaaacacaaggcggcacagggacctggcttcagtgtgcgatgcgagcacctacgcatgaaccacttgcacatctccaccagcttggtctccaccagcaatggtggccggaaaggcatgtaaggggttaggatagttatattcctaagacagagggaaaccggggtgaagacggagctcaccctgcacttatcactggcaagaagcaaatatatgtcatcggtaccggcgaaattccatgcttctaaatgaatgctgaggaaaacggagccggtttccaagtgacttcttggatacggattgtgggtaaataacatctgcttaaagcttggaaacccagcttccttcggtttgtttttaaatgctttgacagtgtggtttgctttttctccccctcccctctgagggtgggaggggagtaaataaagactgtcaatttagttaagacccacagtcaagctgctctcagagcctgcgggcacccaggttggtgatgacagacagcaattcaatatgaaaccagattcattctaaaggcaccttatccaaccttttgtgattgaagtatatatctcgcatctctctagggcgtacactgctatccttttgaagaaaaaaatgacaaagcgaatgtgtagattatttctactttgtcaccaaactgtgctgagagaagattgcaactgttattctttctgggtgattagggttccttccctagcctagcaacagaatgcagcagaaagcaagcagcgagggctaataaaccaacagggacagtgtcaacagcaaaggcagccatggagggaggggcagaggccagagcagctcacctcgaaggatggctgcctgcctgtggctggaacctggagaagagtcagtcccctgcactgactggattgaagggttacccatttgattgtgcaggtagttgtcacagacctgaatcaagtccaccagaaatgctgtattgtatgtctgtttgtctttctctaagtgagtctgtaaagcagagctgatgatcaactgtccctgggacctctttgtgctgactcagaatgtcagttgtctggtatacaaaggagctcacagaactggtgtgtgggcacagtggagccaagagacccctgtgcttggttggggccaagtaaacgccccattcctcactttggcgtttgagacacagctttagtaacttctagaatgaaggccacaactcaggcaagtagaagagaattcttagaaagtgaagtctgcgtgcctctaagttcacagaagaaatcaaagctactgcttgttactcagaagatcagcacagagcaggggtcatccgtccctgtcattgtccctgagctgctagcttccctgcagagcaggctgttctcttaggtttggagggcaaccaataagggaaagttttttttaaaccataatttttataattttattgagataaaatttacaaaatatatcatcatcatttagaaaaagttatgcactttattacaaaacatgcttgcaaataaaaaaatatcacatatcaaaattaaccagacccagagtctatatgtctcgacagacttccatacagtaacagcagctctccagaacggaaactgtggagcttcacgttggatttttacactcttattattgaatacatttgtgtatactttttggttaaaaaattttaatgaataaatacgacttttaaaagcatgcatacttgtgtggtgccaagtgatatgtgcatacattgtgcaatgtctaaatcagagtcaagacaactttctcctggctgggaatatagacacgatggtacagtgcctcatatacattccagatttgattcctagaacaataataaataataataataacagaacaacatagtctttaaaagctttcaattacttatggtaaaaaatcatttaagaatatgatatacatacatgcacatatatgtatatgatatatgtgcatatgtatatattatacacactgaaataataccacgattttacaaaaaacagctaatggctggaaagctctgggttcagagaagagactttttgaaaaataaaaaatctttagaaacaagttagcacagttttgtaaaatactctctcttacatcggttgaaagccacgcagccactgcacataaacccttgcttgtgttaaggtcctgggtcagtatccctcaacctccacagctgaaaggaaaagagaagggctgtgaggagcctgaaggaccatgtcccttctgcctgaagtatctgtacatcccagggatgaggctctgacaggcagggtgttgttggttacagggtaggaattctatttggggttttgggggtttatcctgatgtatattctggctcaagtttcattcccaacaaattaaccagggaaatgacccttcaaaatgaggggacagtgactcacacatttcccaaacatcactcgactggcggtgagttagcggcgagtcactctgacttcttgtgataaagcaggctgccttcattcttagttgctgcacactgatccagggcctctgagatctgagttcccccattgaagagtccctaaagccagtgtttatcagggacttatatggctcttcatatggtgtaatttctgttgatgcagttataagtgatgttaaatgtttggggtcacctggggtttctccagacaccatgagccatttttaaaagtcaaggagagatgccttggcagataggaaagatggctctttcctagacaatttggggtgaggaggtgagccacgatggaggaacaccactgtcatttataactctgtccaccaactctggaatctatggtttggtccccctgccagcatccctgtaacaacatgaaagtcggcttttcttcccctggtcacccacggctccacttccttccaaacagatcttaggcgaggaagtaagtaagagactatgagaggattggtgtgaaataaataaggttgagtcttttttctaagttggaactcagcaaaacaaggcttgctggcaggggcggtagcatgtcagctaagtatagactggaggcaggtacatctgacaacctctgatatctttaaatgtcaaattcaccacacatcacagatggcatcgtgcctgggcatcgaaccccctttaaaatactcttcatgtaaatacattttttgtgaaaccacaagctgtgtctctcagttttgctttcagctggctttgataaagagattggttggcaccctacagctaattaagccccagctttccagctatcatcaatgaaagggctaggtgactctcagaagcatgctccactctccagggtccagggacattcacagtgcctttgacttggggtaacagatccacccttcagcttagccatactcttgagtttaccaccagagccaacctgtttgctatgcagatgcacggtgagaggcaccagcgagctgggtcaggggcaggctgcaggagtataatgtgcctttcctcataaattaatcttacatgtatttcaaactcctgcttgttatgtatttaatgtttcactgaaaatcaattttattttcttctctgtagaaaaacaaacaaacagtgcagtgctttgagaccctagcttctaggataagcatcctgactcgggggcttttctgacatttgtctagtctggctcctgtctctcagttgcagctatttatagacttttatttttaaaaatctcataaaaaaaagaaagaaagaaaaaagagagaaagaaagaaagaaagaacataatatctatacccaactctatatctgagccagtctaacctctaaacacacattgttttagcaaaattattatcatcattttataaatgataacttgacgtcaaacaaaagggtaaacgtaagggtaaaccacattttatttatacatatgtatgtctttaaaacaaaacaaagtttaaaaagttttggtgttaacaagttcaagttgtgtgtgtggaaaaaataacaagaagtcagctaggttacatgtcaaataattgtgctaaaacattaatttttgatacaggggagcttttacgtttatatatactttcccaaaaaatgggattttttttttttaagataaaatcttgaccatttattcaggaagagctcggggctgtgtaaccaccctgctcttaagaaattcccgggtcacaagcagagtggagtgtgaacttgagcttttctgttgtggtgaagcagggtgacaaggaccgaggttctgaagaaaagccttcaaacccatgtcatgctgtgcttttttttccagatgactaaaaccatcatcatttcccaagtctcacacggggcggtggggctgggtgtggttttacagagggcggtaggtgctcctggcaggcttcttctgagtttgagtgcccagttttgctaagtgaggacagggagagtattctaaagtcaaattctcaccagacactccccgaaaatgacaaacaccagtgacctcttttgtcttgaaattccctgtcacttgtaaactacagcattgttaagttcctctgtcttttgttcatcgatggtgtcttccacgaggcagactgcttgcttggtgggacgcagtctcgaaagggctgagagaactagagcaagaagcgtttctgaatttcaggcaggttgctaaacatcactcatgaatggaagatattaactcactggtgttcgcatccgttccacatcaccagaagcagtgtcgacctgtcactgggaatcttttagctcgatcacaaataaaaattccttctgctaagcattctgacaatctctttgtgcagccatcctcctgagttttttgctgtttggtttgggacctcctctgtttatttctgggtggctgtttgtgcagaaattgactttctaaagaaacaacgactccttggactctgtgggtgtttcctctctttgctactaaaagaaatttcaaatgtgaacaggttgtgcctaggcacaagggacaagaatccaccaattcctagattgtctgaggtcagggaagcactgtggtgtttctgtgggttttttttttttcaaagtgttcctcaatttaactatccagaacaacgagcagcgtctttgtctgaaatagatgtgtaaccctgaatttttctgaacacaaataacaaagattaatacttgcagaattgcctggagacccgagagtgatgtgcaggctgcagtgaacggttgtgtctctctgtagacaattgtttgggctttgaagaactcattaattcgattgtaagcgcctcagtgttatcaggaaagtagctgtagaaaatagtttcagaatgtgtcattttctccttggtttaatctgaggcagtgtgtgggcatgctggtattttaaagggctaaaaatgtacacattgctgtgccttcagacctgagggacggcgacaagcagggtttcctggactcacattctgctcgccttccaagccattcctgaatctttaggaaagggtcctctgctgtcggtgtcttgtagtgatacacagaacaacagcaacaacaaccacaacaaaaacaacgaggcagaaagaaaacccaggccagctttctttccatcgggtcctgatcttaatatttaacttcttatcatataaagccttgcgttttcattttatctaggtgccattctttatttgtttttaatgaaatgatttgtggtgtaaggctgccgtttggtttcaatattaatatattgcttgaactccgtgggcgtcgcttattttcagtagtaaataacagcttaactggtgatttttttttcattattatttttcttttacctcggtttaattcatttgactcccagggagtctcatctgcattttcaagctttatcttgtttctgtaattttttgtaaattaataatgatacagcatgtcattaaatgaggcagtcttagtgtctcagcgtggttagacaggagaatgtctccttgctggtttcaaaaatccaatcagcagattaatcattaatgattccccccccaccacacacacacaaaaggcttactagattgtttcagaatatgaatttactagagttctgttttaaaaaatatacaccagtgttctcatctatgcatctttaaccttaaaaggggttcgttgggtgcagatgaagtaccctttctgtttgcattgtggcttcttcattttctcattgactgtaattggtagcaaaaatgttgaaaacagtttgggaacaaaatgtctgcttacaccatgacaaaattggccacaatttgccgattgggttgataacaaaagcccgcaacacaaaataggtagaaaaacagtttgttcggtgatgtgagaccactggagagttccttttgcaggtttctctctctcttttttttattctgctgtttatgttgtgatggaaatacacgcagaggagtctctgcgctccctcccggcctcattaaccacttcactgtctggtttcttttcaaacttcagagaacaacctgttcacctggtatctgaaacaggttttggttaaaagcacctgaacttctgcatttcatccaggttcctgctctgaaaggtctccaagctcacggttttgatctttgaaaggagaatttaaattacacttccccccctaagtcttctatacagaattatattatggttgaattttcacttctgaaagtattaaacaaataattacagcttaaaaaaaagtttctacctgaccatacaatagacaaaaaataaataaataaacaagaaattaacaattaaaagtacaaacaaagccaaactgagaacaaacatgttttacacgaggcaatactttatcttcttcaaatgatagaaccgaggtaaacaggttctccccctaagctgttgttttgacttctcatgtctgtgtgtgtgagtgtgtgtgagtgtgtgagtgggtgtgagagtgtgtgagtgggtgtgagtgggtgtgagtgtgtgtatgtgtgtgtgagtgtatgtctacacatcgatgtgagggtcttctttttttccatctcgagagactcagacactccaggacaatagttaggatgaggcctctgctgatctgatctttgttttcacaaataaatacaaacaactcaaactgaaacccgatggctttgctgatagtacattagcagccgcggggaaattttcttcatttcaatgctctttcacaacccacattcagtttcggtaggaaaattattaaccttttcagcagctaaaagaggggtgtacaatagacaactgggtatgactttaagcctttggttctatttttaagattcgggtataccaaacccctttttctttctttcttcccgccttcctttgagtaattgctttcttccacagttacataattagtcgctgcgtttcaaccagttgctcatgttacactattgacttttattgctgggcggaggattcctaatgcccgctcttctactatttggtgtgacctggaggaaacttggacttgggtctgtttgtctcttctctattcctcccgtgtagggtataagcacacacctccttgatgtttttcaaaatccagtcaggccacatttcacagagggcacctggtttgctctcagaaggcagccccctccctccttcctgcctcaggtagcctcagggtggtgtctgtgatgctaaaggggccagattggcttgctcctctgcaggtctgcgtggcccagggggccgggctggcaggctttctccagacactgcagttgtgcaggggtgtatgcgcgggtggggataggggactttgtggtcagaatcttgcaagtcttgattcttcacctgaaacacacaaaaggtcagaacctggaacagagaggccggacttacaaggtctgttccccagcctagggtgctcacaccctagggaaggctatgtgtgaaaactgggttctactgttatctaaccagcctgtgtttcatgtactcccagtcatcttgttggctttgtgagtccccccaggccccaagtactcttgcctatgcccccaaatcttcaaaggtaaccatggaaactgagggaccaatatcttacctgcagcatgtacctacaatttcttagcttttttctttcttcctctctttctttctactttttctttcttccttccttcccttctttttcttctttgcctcgttctttattttcttatacttcctgtacaaggttaagctttgggttgttgttattgttgttcaacaattctcttcagtctacatttttggcctgtccttctgtgctccctacctgtctcagtatgagtactttgttctgcctggtacctatgctctgacacttcaaatgaccagactaagaggtgtgtgactttgtatctaccctccttcctagggtgacagtaatgtgtgtggagctgatggcatgactctgttcttattgaaatgaaatgccaagagacttcagggccccctattctcagtaggtctatgcagactggggagaggaggcagtgatgggtgtcttggctggttgaacagtttggtataggagatttgagatttgatcctgcatttgagaggcctccagctcaggtctgtgctgtgcagatacccaatatcaaaagcagaagatggaggctcttctctcaacagtctcctcaagccttggaagccttctgagttctccacttttcctgcccaccgtgaattatatggaagctttcaaccccctaaggcagagcctgagtccctcccagagctgctccaacacacccagcttctctccttgaccactgactgagtacagcatcccatctgtccagatccatgtgtatttttcacccgagcctggcatctgtcctctcagaaagatttctggaaaggcccatccactgggtggcttgagaatagttactgaaaccagacactaattgttgactaagtgtggccagtagggtcggtggagactacactagtgttcaagactgtcacttggagcaagccatcacttgccactgttggcccttgcgtttctatttctatttctgggtgctgtgaggacaacccaggttttacccttagagtttccaaatcagaagacacagggggaagcttgagggtttgcatatctagtgcatcctcaggtgatttcatgctgctgtagagagaatggtctggtccagacctgggtgcactgagaactgtgtccagggctagaggccactggcttgctttgaaggatcgtggctctaggttgttgttgtttgtcttgaaggctgaggtctttctcacatgttccaacccaaccttggaggtgactgctgcttttcaaagaccctttgaatttcttagtgaccatgggactgtctgtaactttgtcctctcacaaggccggtcagactatataaatctgtaaaagtgtccaggttttgttctttgaaaaaaattttaatgagcaaatctggagaaggaagtcgaagggaaggatgtggacagatgagaccagaagataacctgggagaccagatctttacctttgtggatcctttgcccatttttacctttggtgtactctgaggccgtccttagtggtacccaaggactactaaaaggtgagcccatttatgagatccttgaggctctggtattgaattttccatgagcatctggcatcagaatgtgatgaccaggatgctgggtgggaacctgggtatgactgtcaagctccacctctggattttgggttccctgtgcttttggctctgcctgcttggtaagagatggccttcacgcatccttctgagaggatggatgccggcttgggtgaaaaccacacatctggacactccggcagatgggatgctgtactcagtagtggatgagaggagctgggtgaggtagaacagctctgggagagactcagactctgccttagagcattgaaagtctttatacatagtcattttctgagccaggagcattctgtagaagctaagtcacatcacccaagccccgaaaggatctaaatatgcttagagatacgtggttgtagctctggacagaggaaccttggtgagagacaagctggggacattgagggctcatgcctcattctctgtatggatacctttcacctctagcctgaactacatttctgttccctaatgagtacttgtcttcagtatggtattcgtgggtcccagattgttcataatgtcttagggaaaataaagttgtgtatccgtagtggggatggggagttgctaatagtgaatattaaagacccacaagaagagcaaagctcaccaaagcagagagcagcttggccctacatgtgaccaggtgtcccttcaggctcaacccagtactggggaggaatgggtggtctccaccactttcagtgtccacttggttatggaagatgtccttgagaattgctgagaattgggaacaaacttcttatagtctccaaatagactagcctgggcttctccaatgaaagctaggtaggcatccaatatagggttcacaggaattagtttcatccatgcaaaagctcccaggccagcttattcaggttctgcagtggtaagctggacttaccactaactttggccactagtccatgggaactaggtgggaaagacccaagtcttagtccacttgtgccccgtctggtgtgaccttggaaagggtgtccacttcctccttctatggcctagcctgctgtgtctataaggccctatcccctctctgcgatttcagtacccacttggctgggagtgccatattgtaactgcttgagctattccatttgactcttgcatcccactaagaagaggcaggctggtgaggacagggcagtcggctatctatctctgcttcatgggtagaactagaggaagccagtttctccttccacccatgtcagccactggtgcgtcacccagttcctgtttctctttgcccacccaggaaggcgctgcagatgaaatcctgggccagatggcggatactgtgagcctggtcagaaaatgctggctcacaggacacaaaacgggaagctggttttcccaagagattcatgggtgggggtagggggtggggaggggatgctgttcccctgactgtgtaggtgtcacacagacaggttccccagcttccagaaacttccccactgccactgacaataggggccttttaaagaataacaaaggcactaaattaccacagttgctgctgtcaagagcccggaccctctaggaagctttgtttttcagagagggtccttagaagcagctcagctagagctcaatggctgggcaatttgccctccttcctaactccacgcagcaacaacactcatgtcgggaaacacacaatacacccgtctgagcaactttgcatatttcctctttcttgtatcctttgtatattatgcattgtgaagggatctcttggggacagatggagctattccaaaaatcatgcaattccccgctctgaggttgcagaaaaaatgtgggtcattaacaaaaggccgtggacagtgcaaagtcctttggagctcagggtgaactcaggctggtatcccactgggggcacagggagatgtcccaggaagttttgagtggtactgccttctcagctgtcagcagtgttgttcagcgtcagagctggaaacagtggccagcttagatttaaccttgttcccatgggagcattgtcttcaaccatctcatgggaaaactgctccagtgtgtgtgtgtgtgtgtgtgtgtgtgtgtgtgtgtgtgtgtgtgtgtgaggcagatttgagtgcagagcaggctctggatctacagcataccttttgagggcacggcaccatctgcctctctctacctgctctgcctttggaaatatcctttcacttgttttggagagctgaggatgtgatctgcagacaggggtgcaccaagggaggctgaccacaggggccttgagcagcagtgcagttatgaatagaactacagtctttctggaacttctgtcagccatatactgtccttgcaacctctgcttggttgtgtgtgtggaggggcttgtcttattattattttttctccttctctcctatagaggctacttggaacaaattcaagtaagcccacagttatctttagagtctcagataggagaggtgttgaggggctctgcaccttgtgaattggagttcccagtggacttgacttgaagttgctttgggtccttggaggcaggagctcaagacatcacctggggtgtcttctaagtcttgtgggagtctctagtaaaaatcaagaacacagaagtagaatctcatagcttactgggcatcagaccccatggggaagtcacaacagggtgaccccaaacaaaacagtggaattctgggaacgtttgccttcctgctctcccctgaatggcttttaaagggttgccacagctcatgaccacggttggatttcggatatcactatgagaatagttgtgttgctgatttgatcccctgctcatagtagcgtttttgatctgtctcccttctcggtttccatgtgctagagtgactgtcacagtgcggttggcagtgacctatgtttttcttgcatatttttgtttcagaataactgggagctgaaacaggaagccccatgacacagttgatcgaaaatgacacagacacagaaaaatcaggacgtgcccccagcagcacccctacctgctgcctgctgatcacggctgggaggcccgtccagggttcccacccgggaacggactcttagctactcagtgctcacgggtgctgggcctgcagagcttttcggatgctctcttacagctggtttgttatcttttaatcaatcaactaattaatctattactttatttattggccctccccatgtcttgatcctttcttcattaaaagcaaaaggaaagaaaatgcaattgtctgtttcttagctaatccagaaacaccgatttaaagggctctaaacttgaacatcaggcaactttctccaagtcacttgtcaagattatcataactgcacacagggcatctttaaaagtgtgtggagctggaatctcatcactcaaccatgtttatcctatgttttatacctttctagaagatctttcaagataatttctctagagtcactgttggcaggctgacagtggagaacactgagatctgtgtggacatgtcttctcagcacagctggtaactcacctagagatcactctcaactttaagcttcagttggaaaccccaactttctctctttcctcctgtctacccccacataaatcactgatttgtagatttgatctataatagtttctttggggtctactgtgtaccacgttctgttggcaaggtagcctccgcacccacctcctgggcatgtttggctcaagaagtgaagaacggggaggtcaagtgtatatcaagggcatttcattccgacgtcctgatttctcaaatccactcctcaattctgagatcctgggactggcacttgaatatcctctgaaatggttaaatggccagtcattctttcgacagagtcctctttcacatcccccaactgtgagctgaacaaatttaccatcctaggaatgtagccaaagagcccatttgtagtccccttcccagagtctattggttttcacttctgagcttagcagaaatccaagaataactcagtggccgtgtctactgctttatacgtctctacatcagtttgctaattggccatgggggtcgtcacagaggctctgggtgagtgaccagtggatattgtccagccctctcccaaatgttcagactctggaaggctctcctgaacaccaagtcccgaggcaccctcagccctgccagttatctctctgattttctacatggggattgaccagcatttgaagtgaccgtcgtcgttgtcgttgtttatttattgtctgtgggtctcactgtccccgcccctcagtttcctctttaagaggcaaacgtgctgtctcatcgccaagcctgtctacagaatctggcactctacagcagacatgctgcctaggtctgtcagatccttgcttctcagtaacaggcacatctgtattgtaaccacgcggtgaggataagcctccacttctgctagatgctggaacaggaggatgaggctctaggccatcctccagtctgctgctcagccagaggggtgggtcacaagccctcccccactgtcatatccacatgctcatcagacccaactttctccttgctaatcttgtcaagtccaagtttatttgactatattcctagaagatcaaaaaaaccattgagttgttgaagtaagtcttcggtggagtgtctcctggaggagctttcctcaaaagagcaccctgggactgtttttcctgtctgcctgggctcaaaccgagaggaagcaattggagaggtcacacagggagcagagatgatggtccagagcatgatgaatagcttagtgacagacataggtctgtgcgtgtgccctgcagaggctcacggaggtatctctgggcatcagcagcagtaagcatgtctctcccagatagctttccctgttctgtatagcagaacacagcctatacagctcatggcctcgcctctactctgtagggtgtttatggtaacagcagcaataaagagagtctcaggcttcaggaagacctgaagtacgcacacagcattgactagataattcactcataaggataatttttgaaaagtaaaagagaattggctatatagttttagtttttgccactgaggcaaaattttgaccctgaccagagagagcaattattcacaaattatatataaaaacaacaacaaccaaaaaattctcaacatccaggaactcatctggacccaacatcagaatttggaagtaggaaacatgtgaaataaacactggtattttaaattttttattgttttgtgtgcttaagtttttttttttcccttcgtgtatgtctgtgtaccacgtgtgtgcctggtgtccaatgagatcagagaggatgtgggaccagagttagacacagttgtgactcaccacgtgtgtgctgggaatcgaacctgggtcctctggcagagaaacaagtgttctagccactgagtcaactctctgcccttcacacacatttttaacatgtagccaagactaagcagcactggtccaggaccaccttctctgctaccgtatccttccttgtgtctccttgcaagctatttttaaaaagatagatgggttaaaacacgggcaagggccacactgttctcagggaggggcatgactcttggggacattctggctactggacgtttaatgcaatggagaatctgaggttttaattccttttgatttttagtttttttaacctaagtgtctcctgtaactgcagctgtcgtattaaacaatgcagaagaaaaagtatgtatatatgtatacacacacacaccatgaacaggcagcttcatcagaagtacaggagctagtctggcacatgggagcagtgagttctcttagctataagggaaattctggctgtcacataggtgtttgagctagctctctctgcctgttaactttgcaaaggactgccctcctgcctcaagcacctatctatattttgactgccctcctgcctcaagcacctatctatattttgagacaggtcttgggcagcagcaaaggaaacattccctacactagagaattgaaaataacctaaaatattttgcaaaaagtccaaggccagtggagaggagccttctgagcctacatgtgtatttattgtaatccaagaatttaagaaaatagagaggagagagatgggagtgccactacaaggacttatagcttttgaaataggctcaggtggggttgaaagaccatctaggttccattcctagacccccatatggtgactcataaccatcttcgttaattgggtccgacgcccccttctggtctctgtaggtactgcactcaccttatgtacataatatacacatgcagccaaacacacctatacaaagaaattttacttttttaaattttaaaacaacagactcagggagagagctgagccagctctaccaatgtggggtttgagatgaggagacagaaggcaaagctgaatcattttcttcttatcactgagactgtcagatttctttctttctatctttttttcaagttggagggaaagcaccttagacagaaaataatactattttgaatttcagagctttcccttttcgagcactgtatcatcttgggtttattttgctctcacactggggcccttggacccgcaagggaggaattgagaacgctgcttgcttctcaaacggacttccctgaaaggagttttaaggattagaaggtgaaggttaaggctttcacatcctgggccacacttatattcccagtgtcataactgagagaagatgtgcagaggtttttaaaagccctgcagtaggttgtgtaaccagcctccccggactgtgtcgtgtctcaccttgatcttctcacccttagcccttgaacctggggacgtttctttcttgtgtgacctgcaagtttaataaatatgacttctgtgtctccttgcaagctatttttaaaaaagatagatgggttaaaacacgggcaagagccacactgttctcagggagggggggcatgactcttggggacattctggggtccaacctcaggctaatgctctcactattcagccccccagtgggtagaagagcagtcattccagaccacacttgaccctggaaggaacactaaagaatctgaggtctcctgagtggcctggacaacaggtcacaggtgcaccaggtggtcatgaatcagtcttctctgggtgattgtgaatcctagactcactgtcattgagcccacctgggaccatacatagataggccaggaggagaggttttcaaatgctttactgaaagtaagacacactttctggggcattcccctaatcgcctgtgctggtgaagctcgtcaaaacaggaaatgaggttagcatggaatgactttctctcagagaacttgtgttgcctcccagagaccaccacgttcttcccaaaagctcgtggtccagtttaacaccttgccagggctttccttgaaatgggcgagtgtctggttttctgcaggctttcggaacgggttgctttgggaaacgcttgttcccagcctttggactccttcccctgactttcatattagcatctctgaagtgtttgcaggttggcgtgaagctcgatctgcatatatgccaaccacagcaagactccgtggttaagccaaggactctgcacacttccgagatgggaggcttcaccggtgccatgggctgtgggcagctccttccaaaccatggctctttgatcccatgctttcacaaagatgccaggaagagagagcaacccagggagtggaaacctccatgggaacaatgtcttctcctctgctccagaggggggcatttaaaggcagaaggaaccagcctggctcctttcaagtaaagcacaccgagtactttgatgaagctgtcaagagtgatgaagggctcacagacttggcaggatctctttggttatctttgctgaggtcttctggcaaagggctctagttgaactctctagaagcacacatctctttcctgagagtaaaggacatttgaggtcagtttgcctttatgtagttgagggaaagtgagctcttggctcacagtgactaagaccatagtctccaaatgccagacttgatttacctcttggtgtctacccaccacactctctggggttcacacttctgtaatcatgggcatgttttgttttgctctatagatatattcttgacttagcagaatctcaaaagccagcccgagttcaaggctgaaagaccattttctttcaggccagaggccctgtgcatatgtgtcagtttgggtgtctgagtcgaaggatttgtaaacagtcacctttctaataaccaacccaactatggagactccagttagttcttttctggtggcttccagcactatttcagagtctctgaaggccgcgtaattacctttatttaggttaaggaaactgagttttagcaagaatcagtttacctcctgtaacaggatagtgtacctcggtttaaactccaaagtatctgggctcacagtagctgtcaccatgcaaccaaccctccaaaaggcctgtgcatggtcaatgacatccaggcataactgaagggtcaatgacctgtgcagtcctaggctcgacttgtgcagccctctgcctgagtcaaattggtagaggtaccagtgttgaccactggcaccagaatcaaccacttccgtagtctcccaggggactttgagagcatggaggtcagactgagtcagttagcaaagggcagctcagttctgcagggctctaggctgagcagtggagcgggctgtcagacagagactcctgtgccccaggcaggcctcttctctcttggctagggtggggaaaactttgagaatcagtaacaacacagaggcaggatgggctgattaaactatgcaaagtcattgctggtgtttgaggagggaaagagaaagaaaagcaaattgtcaaaaaaaaaaaaaaatagtcgtggatctgcaacattcctccacaccaatcgctatcctgccattttggtcttctggacctctctagatgtccatggtccccagtttgctgaagataccctgttcatgccaattagaaaccaacattccttaattagtcacgcacagtcacgcatgctcagtaactcagagaggtcctggtctgggtaaggctgacctaggctggcacaggtttcctcaaaccttgtttctcattttatctacaggttactttacaaacagtagtcccttataccgctttgtctctttaagaaggaagtgggttacctggcagcttatctgcctcctgcagggctgcctcagcagaagcaaagccaactttgaggcatgagaatgagtgtgcacacctaagtatgtgtgttggtggggagatatgatcatatgagtatcgtgcatgtgtacatgagacataggatgtggtgcatatgatgatgtgaactgagtgtctgtggaatggatgtctatggtgcatgtgtgggtatgtggtacatgtctggggcatgtgtgtacctgggtgtatttgcacacccatgcctgtgttggtaggtgggtccatgggtggacatgtgtataggtgactgtgtgcctacatgtgtgacacgggtataatgtggatataggtatgtgatgttcgtatgtgtggtatctatacactgtgtctaagtgggtctggagtctgtggtacatggtgtctatagtagatatgtacatgcctggaggatgtgtgcattagctgtgtgcatgtgtgatggatgtatgcagtagctgtgtgctgtgtgacagtttgtgtgcagtagctgtgtgccagtgacaggtgtgtgcatgtgtgatggatgtgtgcatagctgtgtgcatatgatgggtgtgtgtatgtgtgatggacgtgtgcagtattggaaagattcggctgcattctaagtatgtgtgtggcattcttatctgattgacctcctccaaatcccatcttatctctgcttgtaaattattagcatcctggtccctgtttccaggccctggagcacacaagcaagagtctgccctgcaggaaaacacagccactgtgaggcctctggtcctctgcacctcacttggagataacgtctggagtgctctggctttgctagaaagcagttctgcacattgcaacaaccaggctcctcttgcagagtggatagataagtgttcactcattgtccttcctgtgtcctttcatggtgacctaggatatcaggcaatgcaaacgttgtatttggaaatctatggtccataaaatacttttgcactggcttgcaggaaatgagtttgtttaacaagacagctctaaatgttaagttagtttgaaacagatggatgggtatggatgattactgccaataccccaggcccaaggaaaccagagggcaaggtagccaacctgagagctccctcctgcctggctttggggatgtctgtaccaagggatgatgcagaagtacatgggctcccatactcattggctttgcatccaagagaagtagcagaaaagctctttgtgaaatatcctaaatgagcctcttccagaaaggacctcattctctggggttcaggggagccatttacctgtactgacagacatgtgaggctattgtgggaaaccttgaaaaaaaaggggatccctggtttttctgaagtcaccagcaattggtgctcacaactgtcaccacaagagacccaaaagcaaaacaagaggagtgggggcttttctaggaattccctgtgctcctcttggcgtggcaaggtgaccaaggttcctggttcacctttagacagtgtagaggcggcacattacagaactgcctgggccaagcgagggttgctgtcagagtcagctgactccgataaggaaatccctcacaggcaactcctagttgtagctgcgcgcctccccctccttccactgggcgtggaacaaggaagatcaaatgcactgcgcgctctgcacactggaaatcgggaacttgatcactgcgggctgatgatgtgttttgaaaaaagagcggaggagaggtgttctttccccaaaagttcccatccactgttgagtaaacaccataaatctacggcaggagacaggctgccagcactccgattacctcctgctacacttttagcttcaacttttaattccctgaacatgaacaaccttgtattccagcacaggtctgattaatgaggcaagttcaccatcgtagggccaaagagcagctgcccaccctcttccctcctttcccccctgtggctcagtaaccatttaaggaaccccattccccagcccccaaatatacaaggcaacgggctacaataaaatctataggctgtggcagataaactcctttgtctctaccagagctcgctgctgacagggagcaggacttctccagtttgccctggggaatctaaaatgtctcactgctagctccagcaggagtcttgtacaccttgcctagggagtcactgaaagtctgtgggatacagacaggaccatctgcttcccggactactgcatagttgaagctatggccaaagatcacatcctcaagatgatccaaatttacacccaggaaaaaaaaggagatcgtcttattaaaatatctgtactccaaatacactgatgagtgtcttgaataattttggcatgggggagagccgactgagtatttaacacgtgctagacaccctcctaagaactgtcatggtgctcctgtgaatagttttggggagctctggaaaggctccacataatgagttctgcatatctgacatcatttgctgacaacagcagccctgggtggttggtggcattagctccatgcttcccccgtgagtgagcagaggcttatgggaggacatggtgtgctatgtggctagtctctgttgtcatcttgactgcatctagaatcagctaaaacccaagccttgggcaactcttgtggaggatttttcttatcaattttttgaggcaggaatatttaccccagtgctggacttctggtgacagaccacgtaaaaggatgtggaagaaggaaactttgcgttttgcctacttagcctcactccttctggcaagaccatctatcctattgctacatttcatcaccaacattagaactaacttctttgggattctaatatagactgaagccagtgtctctccaggggtcctccaggacactacatgggagctatgagacagtgtgaaaaggccattgctggattagctgggctatatcctgtaagcagtctaagaaatcctatatatattctctactttgaagagccctggctaatacacttgtccggggatccagtttgagtctgagctctgctctggcttcaacttcaccctcagtaatccatagactcacctcggtaattgcatccactgcccactactaatcctcacacgtacacgtctacacacacgcaccctcgtccacacttgcttcagcattagattcattccctcaagagaacctggattgatccaaaatgtagagatctagaatataacttccccacgctgttaaggctttcacagaatcaaacttccaactgagttttgatttttcagcaaacttttgttcaaaatggctagctggaaattatcttagatgtgcaggcccttcagtgtcttagagcttctctgccagtgtagcatagcaacagccagaggtgatgcacagaggagagccattgtgttctaataaaatgttattacaaacaagacaaaaactctgggcagcctaggaatttggagcaatggacagtagtttgagactccatcattttcaactcaagacaccattaaaagtaatattaggacgctagcgttttagatatagggtcagtccaacctaccagaagtgaacgtggaggcagggtccttgcaggtaggcagtagaagtatggggacattgttgtcacagccaggtatcctgggccaggcagagcccaattaacattctacataaaagttccctggcctagcttaagaaaccagacaccaggcaactgagtgcatccctactgctgccagtgtgtgtgtgtgtgtgtgtgtgtgtgtgtgtgtgtgttgctaactatggtgaatctagggaagaccatccacatctccccagagggacagatgcatgaggcctgagcatattggcacaaggtcctttggacgaatcactatgaaccccaggctcatacgtctgctatgctatcttccttgttcctcggtcctggtcccgggaagagtacccatctgagtggggccctgtgctgtctacctacagatcacagtgatgtgagaacgtggtcccggtgtcttacgtcctggccttagttcctggtcctgcctctccctggcccaggcagcaaaggccaccacagtgagcagaccccataacagacaggggacagttcacagtacagccctgagtcactctaccaccaagacaatttttgcaacctctctgagccctagtttcccctttggtaaatggatgacaggattagcttttgcccggaggagatgtaaggaagaagagaagtaggacctagaaaaggccagcccccagagaagaggcctccacactgagctgccaggaaaggcttctgccatctgttcatgcctcagagccaatgctgctcagaggggagcctggccaggtatttaaaagggaccttgacttactttgtggtaatcaatctggccctctgtttgagagtctgagaaccacactcagtttcattcacaccctgcctgcccttcatgccagatgtggcccttgcctctccagtgttattcaaccctcacatgcagctttcaaaaacaccccaaactcatcaccatgtaggggtggggaaaactgaggcactcaatttaaacaatcccccagggcaaaggaaagtcctggtgctgggattagaacctgtggtgagcacctgagttgtccctcctaaccacaggtatctaggacacagcatgggctaggccttagctggacatggaggtgctctgagtccacactgggacaactgaggcaaggcccagctctctatgggacacacctgttcctttagcgccagctgccctgagcaggacatagtgaagtcactagctccactggactcttagctttccagagcccagggacattcaaaggtgtgggcaatgagagcctgggattgcactgtgcagaggacagcagaggaggagggtgtcaccaacagtgactagagatggacatggcttttgtcatcatctccatgcccttgaggtgggaaggatgagtcaggtaggaaggcaagtggtcccctaattcctgaaagggggctcctggctcctggttggagctccatttgcctgtatcctgggcctgggaacagggactctgggagtagagctgagcccccactgggaagtgagagcctggcttagttcctcatatgaggcacacccaaattcccaaggcctcaagttgctcaactgtgtcagggaaagcctgggccaccgctttccgaatagtggctgagtctaaactttggtgaccagagtctggcctgtctggcctcagagactgaggaacacactctccatgtcccatagtccacacagggaggagagagctgcgattctgatggccaagggacagctgttccccattcatctttgtcaagctctgacgcctttggggactaaacttgaaggacaattttgacggttgtaaccaagagagctgaaggaggtcaaggacaccctaccccaaccctacccctgcgttattctgggacttttttcttgctcaggagaagacattttggtaaacaagggctgtgaccaaatgtacctcccctccccctctcccacaccacactctgtcacccaggctggaaagaaatgagccagcaagaagtatttcatgtctagctaccatcttttgagacatacctgcttgggacacctatgaaccaagacccttggcccagttctaccgccacctccacctaaccatcatgaacatacacacacacacacacacacacacacacacacacactgtgatttaaatgccttaatggcctatggccctcaaagcaaagcccctcagggagcctttagcagttcctactctgagtgctgcctgtctggacttcttcctgggatataactctaggtgggtacctggcagccctgtttattcggacctttggcctggccctgttcccaacatgcactgcagctcgcatggtgggtcctccttttcgccttatagaataatcaattcccgccagctgggtgatttaggccgagagtgggcacagtaagcgagatgctgaatgactctcagagccacgggctccgaggtgcctggcccaggggactttcgggaggggttgcaggctccagtatttggaggctgtttcccagcaggaggaagtctggacacctcctgggatttccctgtggcttaaggaacccgcttggttcctctagcttttgctcttctcctgcagagtacccgtctttcccatgctgccttcaactcttgggagcttccagtagcaccgatgtttgctggtacagttcaggaggctgaaataactctcactagcaggagtcaaggtgccatgggtctggtaccagcagatagctttcgcctccctctgttttggtttctctaggctattagcactccttgtctgtggacccttcctctctctatattacagaatgactcttctgcccacccccatctcccctcctctggccttatgtctctgttttatgaggctctggatgataacaaagttgtactcggggaccagaggctgcaggtgttttgagagtgagtctcctgccgctcccacctgtgtgctgaggttgcaggtgagcactgtggggcccaggtgagagtgtgttttagttacatttatatcgctgtgacaaaacaacatgacctgggctattattagaaggagggggttacttgggatcacaggtccagagggataaagtcccctgctgctatgatgaggaagtgcggcagcaagcaggcatgacagctcagacagcttagtgtcttaaaccacaagcagggggctggagagatggctcagcagttaagagcactgactgttcttccagaggtcctgagttcaattcccagcaacaacatggtggctcacaaccatctgtaatgagatctgatgccctcttctggtgtgtctaaagacagctacagtgtgcttatatataattaataaagtaatctttaaaaaaaaacccacaagcaggaagtagagcaaactgggaatgatgcattgctcagaaagctcaaagcccactacccaaatgacatatttcccctgtaagatcacacccccatgagcctccatgagcctccccaaacagtcccaaatgccagagactatgggaagcattcgtcagtaatacctccacagaatggttgaaatctagtaagatatggggtgtgggcagctagctgggtaagtgtgtgtgtttctgtatatgtatgtgtgtgtctgtatctgtgtctctgtatatgtttctgtatgtgtgcatgtctctgtgtgtatgtctgtgtgtatgtctgtattgtgtgtatgtgtttctgtgttcctctatgtgtgtgtgcctgtatatatgtatatgtatctctatgtatctctgtgtgtttgtatgtatgatgtatgtatgtatgtgtgtctgtgtatgtctctgtatgtgtgtgtctgtatatgtatgtgtgtttgtctgtgtgtgtatgtctctgtgtgtgtgtctatgagtgtctgtgtgtgtatatatgtatgtgtatttttgtgtgtctctatgtgtgtgtgtctgtatgtgtttgtatatgtattttgtatgtctgtgtgtgtgtctgggcagggatcggggagggcataccaacaataacacaacccaggagaactggctggatcagaaagggtattaaccactatatccgaggtcctccaaagactgcttgagagttgggggtttgacaatgacccaaggtctctagtcagcagatcttggtcctcagccaggtgggcaatcatctgggtttgctcgggactgaggatctcctgggaagggcttttggcactaaagccaggtcagtcttgggggggcctggagagcaggtatcctatctcccccacccccaactctgtggctgagaaaggatctaacccccttttgtcttcagccttgatcactggacagatgcccactctggttactcttgtgtgtgtgtggggggggggggggtaggggttgctctcaacatctctcttggaatagaagccagaatttttccaggattttggactgggaagtggaaagtgagcacttaaaaacctttagggtttcatgagaagaatcagattttattttaacagtaaattataatatttgacaaaatgcagacacattgcttctcagagctggtactgagtcagcgtggaaagtattctttctctagagcagcggttttgtcctcggccttcctggtgctaagaccctttaatacagttgcttgtgctgtgacaccagctgtaaaattagtgcattgctatgtcacaactgctgctgttatgaatcataatgtaaataactgatatgcaggatatctgatatatgaccccaaagaggtcacaaccctcatattgagaacctctgagctagaggagtaagtgtgaattacagaaagactttacttgagtggtgatggctcagggaagacttcagcagcgtgtctcgtcactagggacacacctaggtgtagaagaatcctgaccatctggatggagaccccttggggtctctgtcaagcctctggactctcctttgtgatggttaaccttgttaattaaacaggatataaaaccaccatggaaacgcatttctgtgtgtgcctgtaagagtaatcccagtcagaatgaatgggaaaggaggggtctccctaaatgtgggtggcatcctctcatgggctatggtcctggagtgaagaagatgggagctgagtacaatgttcatctccctttgttttctgacttgaggcaggagaatccacggtctcactcttccacaaactaccttccccataggatgctctgcaccctgaactgtgagccaaatacaaaactttcctttcttcacaacaatgtgaaacgaaaaaggagaggttgttcctctcatggcccatcagagtgtataaaacactcaggaataggttaaggaatagtcataagtaccatatatcgatctcctagttggtaataataaaatatttcgttttgccgataaagcatggataccctgacagtctgccagttttagttgcttcatgaccttgtcaacatttttcattcacggtgtttagcatagcggccatttagtacatgggaaatgggatctcattgtggttttaattagaatttccctaattacttggggattaattagggaagtaattctctaatttccctaatcatgttgtctacctgtgcaggcttattggccattggtaaagtatctgttctaccttgtattggtttgttgttattgctgttgttgttgttgttgttgttgttgttattcagacatccagcaagaagcagctcaagggtttatcttggctcacagtttgaaggtccgactcatcatggcaggacttggcgttgggtcagatgccctgtggctgtgtcatgtggaatgcgaggctgcctgctcatatctcagcagatccagaggggacaaagaagaaggccacacccacacgacttcaggcaaggatgctgctgctcacattcagggtggattttttttttttgttctgcccttgttaagaatttataagagatctttatacatgcctaaaataaataaatccattactgaccagacagattctgagtattttcaccgtctatgccttttttcgtttttgctgcatataaacaatttatcagttgcattctgtcatcagtgtttttcttgttctaagaagtttctgcctacaccaagatggccaagattttccaagtcttctgcgtgtgtagcgataattttggaatcttggcttctttaaaaagcacaaatattataaaaatatgctttcagtttaatcccaggtgtagggatgtggggctatttcagactgtctgcagcagctgactatgatttgcctcatgctctagtagagatgtggttttgccagctgcagatagtctctgtgattgtggtatgtttggaattctgggaacctttcagaaaatacctaaatgctaggacccgagagatgaggtcagttgttgctggtcatttaggaagattggttgcagtgtctagtagccatggtcaaagaagaaacaaaagaaaagaaattagattcatgaattttcctatttcctgtatccccactatccttgtttttctctcctatctagtttttttttgggggggggggtaaaaccaggggtagggtgacataaagggtgggaaaaagaagaacccacaaagtagcaaagaccagctatatttgtattttataatttgggacttttacttttaaagatgtattgcttaattttcatttgaagatttaaaatgatgttgctattctggaacttccacttgattctttaaaaaaatgtattgctaagacaatgggaagtagagaggataatggaacacatgtgttaagaaagcagataggagattgtgtatggaaaggagaggaaccagctggaggtgggaaggtgctggagcaaacagtgggggaggggggcaatgagagcagagtttaatgcttatgttatgagtgaagatgacacaatgaaacccattgttttgtctgataaccttaaaataaaaaatatatagtatatatgtgtataaatattatataaatggatatgaatgaatgtatatattgtatatatgcatatatactacatacatatacattcatatatatccattgttgtctccaattctccatctgatcactcattatagctatgttttcacttatgtcctttaaacatgcaattgttaagtttttatggtgctgagcaattagctcagtgctagagtagtttagcatgtgccagaccctggacttaaacctaagcaccaagggaaaacaaaagctcttaactagttattacaacataggatatactttgacttttgtgtcattgtgttctccccttaaatacaaatcactttaaaacctttttctcacccatttaaaatttcttcttgatgctgttcctcgtgctgatggtggcagagattctggatcctgtttttctttgacatcattgggtggttacttgtggatatcatcttgaagatgtagaagtctggctttgcagtctttaatgtagccttgctcaacatttctccttaaactgagagaaaaaattaatccctggaacatggtctcttggtcctcagtataacatgcctaggattttatgacttgcccagggcatttcaaaggttcttttggaaaagttggcaggattcaaactctaaattctgtctcctaattggtgggtgagagatgaatatcaactcacatttaaaacatttaagcacttctagcaccctgcccccgcccccatttctgatcaccatggatgtccatgttctgtcccctgtcacctcatggcaattttctgccaacagcctggaggggctctgggaagacagtataggcctggtcttactcaatgaagttcctccttccaaaagccaatcccaacttccagatatatattttctttttctcacattttgttcagagtttataacctcctgtagaggatttgacactagcaactgtccaaccccaccagcaccagaactacctacctcttctgaacccactgtaaggttttgaacaatattttttcaaaatcagcctccacaaaaaaattattttgaataacatcctctgtaatagcagcctagggttctttaaagcctttgctgttagtagctggaatttctcaggacaatgttgtaggaagccagaaacagagactaccaggcctgccacttcccagttgtttaaaggcacctgggcactcaaaagctgtataaaggcaatttgtggtggaagggtggtcttcagaagttttagtactttgtacaaatatacaatacagttcccatagcataagccttggataccattacttaggattggtcttgtggtttttttgtttgtttgtttgttttgtttttttttcatgaagatgctgatgttctcctgttcatcaggagccctccttgaaagttaagttcatttttgatcaacccaaacttgcaaacttcattcttgctgataagtgagggtattggtgttaggatactgaggtcttcccaagacagtcactctgatgagtgctttgtggggtcctggacactgtggacagcaaatgagaaaaatctctagatactaaggcttcttccttgcctctgtccttgaactgtcagaagccccaggagacgaaagagctgctcagagtcacagtgagtcacttgtgctgtgaatgcagagaacaaaacatacagcagtctgtgttctacactcagctgcaccttctgtcagggacggagtgattctgaagttcaccgtgtctcagggaggaaagaaaatagtgatgtggggctggagagacaacttggcagttaagagcaatgactgctgctcttccaggggacttgggtttggttccaacatctacatgtgctggcccacaaccacctgtaaccccagttccaataagatccaatggcttcttccgactctctctctctctctctcatcatgcacacatacagagggatcagggaggagggagagaaagagcttttttaaaaaatcagtctacttcaaatgctctttcattggctgagatgtttttgttttgttttgtcttgttttgtgtttctgtgataaaatatcctggccaaaatcaatttaggggaggaaggtgtttctttggctttgtaattccatgtcgttgttgatggagggtctaggtggaaggaatcaagacagctagtcacatctcaccgaagaacaaagagacatgaaggtgcacattgggcctttctgctggctgctgtgcccagtgttcttcccagcaggtaaaagcatgctgcccacattcagggagggcttcccacctcatttcacaaccaagacaattccccactcacatccacaggccaacctgatctaacaatcccttaaggactctcttcccagggaagcctaaaatgtgtccagttgacaactgaaatgaatcgtcatacttgttcattcaggtctgaggatgtggattatattttctctgccatttgagctcttcaaataaagtgatttgcagatccaaatgctttttaccagtagactagaggtagaaactatgcagactctgaagccagctcatctggatttcatcatcaggtctgcccttgtccataagaattgctacagcttcagcttccacactgactgagtctgcttcagtcccaactccaacacacacacaagctgtgtaacctgcagtaccttgcttaagctctgggatccatcttcctcatctgttaaatacaagtgttagggccttagctgttgtatataaaattcttagccagtttttcctgcatgtgaagacacaaagaggacaccacgaacatgtaaaccattgttgctgacaatgaaagaatatctacgtggacatttttgtcaaatgaaagacaatgcagggacccaaaccagtctggtaaatatttgtgctccaacatgcccacctagacattcatgggtgtgaccccagcaagataagtgaaggtgtgtgctagccaaggctgtgttggtcagaggtagtggatgtaggcatttctttggaaatagaaatgtacaatgagcgccgggcatggtggcacatgcctttgatcccagcacttgggaggcagaggcaggcggatctctgagttcaaggccagcctgggctacacagagaaaccctgtctcaaaaaaccaaaaaaaaaaaaaaaaaaagtgcaatgaatcaagcaaaattatagtaacaaaaggcatcaatgtggaaggcgaagaccagctcctgaggctgtcccctgacttataaggaccagcacctgaggctgtcccctgacttataaggaccagcacctgaggctgtcccctgatctgcaaggaccagcacttgaggttgtctcctgaccagcaaggaccagcacctgaggttgtcccctgacctccatagatacactatagtatggtcgtgctcacagtcacaggtatgaatccacacacatggagaaaataaaatgacagaaaggtggtcactgggggccacagtgcctactctcaacactgccagtaaagctgtgacgaggactttgcctgttagtgtccctgtctccagaaacgtggattcaggcgtgaccgctatagttcagatcagcaaaagagtgcccaccagagccaggaactgtcaccgtggtgttgaacttggaaaggaggatggaaatgttcactcatccgtgagctttgcgtgcagttcctgtaggctggaggctcaagcttctcgctactcacttctgtttggttgtaaaactctgagcgcctcacccctgtttctgacctctccacagccatcttccaacctcggtttctcctcagagctgtggaaggattctggtggcaggatcacgttccgtctgtgcagtgtgctcacggtctgtgtgggtggtggctcgcccctcaccgtgcccggattcctaatatccaaatgctttctccccttctctttttttacagtctatagttttccaaaggctgggaaataaaaatgtctgactgataaatgagtctagttaggtggaaggatgacgcgggtccattttaattcctcatttgcttttctctgcttccaaaattcatgcaataaacatccatcatgtttgtgatcagaaggaacgagcccaataaaaagccaacccagaccccaaggttgagcgttctgattggctgagggcctaagctccaagaaagagttgaaagttctctcccctctgattgctgcacactacactccaggtgatgatactgcagagtccccttttcccagagctgcagacctgtagggacccaaagtagccaagactctcttaccctggggacctacttccagcttctaacactttaagcaacagttcttctccagatcggggctcctaccagctgacacccacacatgcagccttgcacagtcaagaccctccattgtgtcccataggtccccaactatctgtctttatcttcagacaggaatgccgagtctcttctcacacatggcagccaggatcatctctctgggacacattttctgggtggcagtgtttgctccttggtagttcaagtctctctgtctactctgggtctcccagtctgttagttcagcctccactgagctgcctttatttctttttaattatacatctgctatcttttaaaatggaagtttcctattggatttctatgacaatatagagacatggatcaactccaacaaaaatgaaatcgttaatggactagttatttctctcctgggcttccctgacagaagaacccctgtggatatatgcatgttggttggaattccccttcagtatgttgaggggtggcgccccttcagtcttggcagggactcagcagctgagtggcagacattggtgaatggtgtgaggattcagctgggggaaccaagagtggaggagtggaaggatggcaggaagcatgtgagcttagaaatcctgccccagagtaagctgggctatcaccggctcttagtcctgcacaatctagaaacatggctttgcatgtatggggaagacaggcccagcttggacacctgctgcccagcctggcactagatgtgacttacctttctcattattattagaagaaggaagagaagggaagaggggtttatcctggtgtccaatttaagaaaggctccaagtacttcttgccagggaaggctccgtgataggggtgtagggcagctagccgcagttggtcagcactcaggcacagagtgcttgtgtgttgctagggctcagctcacttttcctttgtagtctttccaggactccagcccagggattggagccacccacatttaggaagacttttctcagctcgtctcagtcaagacaaatcccttcttgttgttcttagagtcatttaatttttatgtgtatgaatattttgtttgtctgtgcaccctgtgcatgcttggtgcccactgagctcagaagagagcattggttcccctgattgtaagctaccagaaggatgctgggaattgaacccaggtcctctgtaagaacaaaagtgctcttaaccactgagccatctctccagcccacaactaacttgatctagaaaatccccaacaaacatgccaaggggcttgcttctatggtaatgctaaaccccaccaagtttccagtgaagatcagccatcttacacggagaaactattgtctggggtctacacccatcctggctgcatgggatttcaagatgccagcatgctccctggggccagttgctcataacatgggccatttgttatggcttctagtaatggttccatgtcaagtggccatcacaagttatagccttcttgtttgcagagttccaaagtggtgcagaggaacacatagtaagagatatggagtgaacgcatgcgcacatgtgtgtgtatgtgtgtgggtgtgtgtgggtgtgttttctggtctctgtcatgaagccaaccaggattcaatgacacctactctggtgacctttcctcgtcctaaaggccttgcctgtaaacatggcagttacatggcacctccaccttcctcagcccgcacaatggtgatcagagcccaacatgactttcagaagtgttattccctcgcacacataacatttttaaatacacttgaaaataattgctttctttaagagtgtgcattctaaaactatgacttccatattcctaacagtgaagtgactggatagtgggggggcgggggggacagtcaggtttttaacagaatgagaattacagacaaggaaaagactgcgattgttctcatggtaatcccttagtgttagagagaccagtgtggaatcaactttagcttactacagctacagatggttacgcacaaaatattcagataactcatgtaggcacatatattttcctattctgccatctaaggtgggggtgaaaaatcttatcacaacaacaaaaagcacacctctattccagattttttgtttgtttgttttagttttcattgtatgtgtaggggcaatttgcctacatgtacttctgtacaccacatgcatgcagtgctctcagagtccaggagagggcgtcagatctccaggaactggagttacagctggccataaattgcaatgtgggtgctaggaattgaatctgaacatttctttaagtgcttcttgaccattcgagattcctctgttgagaattctctgtttagctctgtaccccattttaaaaattgggttatttggtttgttgttgtctaatttcttgagttctttatatattttggatattagtcctctgtcagatgcagcattggtgaagatcttttctattctgtatgctgcagttttgtcctgctgctgatgtccttagccttgcaaaaggcttttcagtttcatgaggtctcatttattaattgttgatcttagagcctgagcaactggtgttctgtaattggatttgtctcctgtgcccatgtgtccaaggctttccccactttcttgactattagatttagtgcatctggttttatggtgaggtctttgatccacttggattggagttttgtgcagggtgatagatgtgtatctatttgcattgttttctacatgcagacatccagttagaccagcaccatttgttaaagatgttttcatttttccattgtatgggttttggcttctgtgtcaaatatcaagtgtccatagatgtgtgggtttatttctctgtcttcaatttgattccattgatcaactaatctatttctacactattaccctgagtatttatcactattgctctgtagtacagcctgagatcagggatggctatacctccagaagttcttttattgtacaggaatttttttagctatcctgggttttttgtttttccataggaagttgagaattgctttttcaaggtctgtaaagaatggtgttggaatgttgatgggaattgcattgaatgtgtagattgattttggtaagatggccatttttactatgttaatcctgccaatccatgagcaggggagatatttccatcttctgatatcttcctcaatttctttctttggaaaattgaagttcttgtcatatagatctttcacttggtttgttagagtcacaccaagacattttatattatttgtggttattgtagagagtgttgtttcctcaatttctttctcagcccatatatcatgtgtgtaaaggagagctactgattttttttttagttgattttgtatccagccactttgctaaaggtgctcatcagctgtaggagttctctgatagaattacagacaggaacctagcataactgtctcccaagaggcttcagccagaagtgaagggggaaagtgcagagatccataggcaaacatcaggcagagtttgggtggtcttacagacaaatagggggtagaattgagggagctgggggctcaaggacaccacaagaagacctacagagacttgaagacctatgagataactaaatgtagatttggtatcaagtattcaggtgaaatactgtggaaatttgataaactgtagagttcagttgatttatgttgtaattaatggtgacatgtagacctcgtcaacctgggcccataggggctcacaaagactgaaccaccaaccaaagagcatgctggagcttgacctagcccaccccccatttgtagcagatgtgaacttgatctttatgtggaccccctaacaattggagttgtctcttactctgtcacatgccattggacccccttcccctacatggactgcctggttggacctcagtggaagaggagatgtttagtcctgcggggactagatgtcccagggtagggtggtactcaactgggctgaggggagggatttgtaagggcaagactgagagaacaaattgaggaaaatagaaaagtgcaacagaatttcaaatagtgtgcagacagtccaccctcataggtggaatacagctccccactcttcaagtgtggctgggcttgatgacttccttccaaagagtgggaggcatctcacagtggagaggtaccacaaacaccatcctagtcagatggtcaagcgagatgtcacgataacaggtattcgtgtgtgtgtgtgtgtgtgtgtgtgtgtgaagatgtcacctctcttctgaggttttatcactcaactgtgataataagcaaaataacaacaacaacaaacccaaaccaacagaaattccacctaacagttctcaaaatggccacaagctgcaaaaacataagtttgagaaattgtcatggccaagaggaatcggtcagatatgataactaaatgtagctgcaataccaagtattcaggtgaaatactgtggagatttgataaactgtagagttcggttggtttacgttatgattcacggtgacaagtagacctagtcaagggaccgagtgtgaggtataggaagactccctgcactaattgtcaacttttctggaaaatgaaaactttggaaataagaagtttagttttaaaaaaggaggtaaataaaggtacccccctccgatctttctcctgttctgtgtctttcttccctcctctcttcgccctctactcctttatttcggaaagagcatcatacaaatgcccaggaccttgtcactttccagctgtcttcctctgcatttctctgaagcctggtaatatatcgccttccatttcacaaacagttagacatccccatcacctgtcgaccttgacacctgcaaagatccctagtagaaactgcccaataggctagcttgagctcatttgcaccatccccactgttcagcatggccttgtgagcagtcagggtcttggccactcagcttagggagctcaggacactcccaagggaaatgtccgtttttcagggagaacctttgcagggagattgcagtccatgcctgctatctgctctctggcccacaggcgcgtctccaagcatgtaccacagcacccgagtgtgggcagaagccctcgtgctgagtgggatgaagctttgaagaggctgagacctatgagaaccgaagaacctttgaatctcccttcagctcccctaccccgaccacagccctcctcttgatgtaaaacatgtgttgaacttgagaacaaggaggctggcgtctgtgccaggaagactgcgctgctttaagcttcttcgggggttggaaacagatctacctctgaggtttgcatagcactctccgtggaagtcactatggctggttgagatgtggatttgtgagacagcacctgaagcagtgtgcattcctgtcactcgacctgttgtgttggggaggaacgcccagcttaccaccaggattatctctggaggctgaaggcagatgcctggactctcttgagagcatgtaaatgttaaactgaaatgttcagaaaccaagagaaggagccttccagaacaactgtgtacccggaatatacactctgtatagctgacgtattcatctacaggatagaccagaaaatctgtcttctaggcttccttctgcctcttcaccagctctgagagcctgaagagtcatggggcctcttatcaaagaaatgttgaaaaatgactaagaccaccgcctttaatcccagcatttaggagacagaggcaagcagctctctgagttccagaacagccagaaatgcacagagaaattctgcctcaaaaaagccaaacaaacaaaaaacaaaacaaaagaaaaagaaaatatggaccaaatacattaaaaactaatctcccagctccaaatgatacaggagagaccatgtatcaagggactaagagggcaagttaataggacaggacccctgatgtcctcctctggcctctacccacgtgtgtcagtgcatgcacaatcacacatatatgtgcatatagcacaatacacattacagcttctctctctctctctctccctctctctctctctctctctcacacacacacacacacacacacacacactcacacccacagtctgtgagtgctttgtctcgtaaacaggagactaggtgtccagattgggactaagttaagagatagtaacatctgtagatgggctgaccaagtggttaaaatggagatgacaagaggacaagagaacctgaacataagaggttcaggtgacattgcccctcagcaaatacttctcaagtgtctcctgcatgccagtcactaaccacagaggagaaggagggacagaaggccagtcactaccacagaggaaaaggatggccagaagcataatttatattctttctttctctctctgaatatataatatatatgtacacatattagccatgactgtgttcgataccattatgacatcatcacaagctgtgtttctatgtttacctttcatcatctttctcatccttcatctatccctgcccccctaacagctcctccccagatattttccccctttcatgtctcatgttcccttttgccccaggctccctgtctcactgaaggtttgtattactgtaataaaacaccacaaccaaaaacaacttggggaggaaagggtttattttggtttacagctctcaggctcttcatagggaagtcagggcaggaactcaaggcaggaacctggaggcaggggctgaggcagatgccacagaggagtgctgcttactgccttgctcagtttgttttcttttaaaacccaggacctcctccccagggttggcaccactcacagggtgctagatctctcacattgatcatccatcaagaaaatgccccacaggtttgctggcacactgacctgatggaggcattttcccagataaggcctctcctctcagatcactttagcttgtgtaaaattgatttaaaaaaaaaaaaaaagacagatccagcatcccctattgtactggctagtttgtgtcaacttgacacagctggagttatcacagagcaaggagcttcagttgaggaaatgcctccatgagatccagctgtaaggcattttctcaattagtgatcaagggggaaaggccccttgtgggtgggaccatctctgggctggtagtcttgggttctataagagagcaggctgagcaagccaggggaagcaagccaggggaagcaagccagtaaggaacatccctccatggcttctgcttcagttcctgatttctgacctgcttgagttccagtcctgacatcctttggtgatgaacagcaatgtggaaaatgtaagctgaataaaccctttcctccccaacttgcttcttggtcatgatgcttgtgcaggaatagaaaccctgactaagacacctatccttccctatcagctaatactaccctctcttggcctcctagacttttacattatgcacatttatacctgtttacatacatacaagtatgcagtgtagactaggatccacatacaagagagaacatgtggtttttgtctttctgactttaggtcaccttacttggtgttatacttttaagatccatccattttcctgtagatttaattttttcttcactgctgaaagtatcctactgtgtataataagtgccacatttaaagggtccattcacccactgatggatatctaggctgggtccatccccttgctgctgtgaatatagcagcaataaacaaggatgggcaagtgtttccttggaagaaaaaaatatttcctaaattgatatattaagtaatgcttagtgaggaaaaataactctggagtgtgtaaataataaagacttaggggtgaagataaggaaaaaagagaaggtgtttaggaggaggctacagaacaagaggcagattggggtacagcaaaagaagaaagactggcattccacgtcaggtatatgagcaccatctcattgatggtccaacggagtgaagtcccaggacctcctgtgtgcagctcctctcaccggatctggaaatgcggcagagttctaaggcagatgacatattgtaaagatttcccagagccaagaggatggtgtgtgtcatggggctttgaagaacagtcgtggagtccctcgctaccctggaaagttgaggtccaagcaacactgcacgggctgctgctgtgggtgcgtgtggaggcattcccaccaagtgggagggccctcccattatgagtgtgaatattgtcagggttttctctgtcccctgcccccatgagtctgcctatggctgcatcctgtagtttcattcctgcctaggagagcttctccttcaagcagactgtggcttctcctgtagtcatgcgaagaagttatcaggtttctctagaaaagccactaggataaaggggaagttatcaagaggccaggtcttcagtcgctgaggacaaaggtattcctctccaccataattcacgtgggagcccatcgctgcccgaaagaggaagtgcgggttgctctcacttctgagcctcttcggaggaattctgttgagaaacagagacaaaacataaaagcgaaagaccacactttctctccttctctcccgaaggagcagagagacccttcatagcagcacaggctcactcctccttcaggcaacagagaaaaatctcttcagagcgttgacagggcctggatgctggctttggaggagcacttaccccaggctgagcactttccagcctggcctcttagcatgcgatgtacagaggcttgacatgaagagaaccacacaccaggactcacaggacgaaatccaagactggcacggaccagccttctgtgggagtgaatgtgaatttgctcgtactgctaatgcttgctggcaactgttagctttcttggctcacagcagcaccatcggatcgatgtgtatcttcactgttatacaaatgcacccctctatatgccttggtgtccacatttccccttcgaataagaactgtactgaattttggattccagcccactctagtgacctcatctcaactaattatatgcatagcatcccgattcatcctgggaaaggtatgttctgagatactagaggttagacgtgaatggatgggtctggtagatgtcctagttttcatcaacgtgacacaaacctagacatttctggaaagaagggaaatcaatagagagactgcctccattaacagattggcttgtggagtgtgtctgtggagaactttcttgattgatcatggatgccacagagggcccagcctattgtgggtgatacgatgactaagccagtggtcctgggctattcaagtagcattccctgagtgtgcttgcacacacacacagacacacacacacacacagacacacacacacacagagtcctctcagttttctctctaggttcctgccttggcttcccttaatgatggactataaactataagccaaacaaactctttcctgtccaaactgttttatcagggcagtggaaggcaaagcagaatactggggaacacacttcccacagtgactttttctttccacttaggtttgaggagctacagacccacaggtgaaagggatgacttgcatggggtctctccttgactcggccttgggtcgctctgagccagaggctggctgggctcccatcacggcagagcccactgagaactaaggacactaggtgcccactccactactgagctccagctgagaggagtctttactgggtttttaatttaaaatgttttatgtgtgtgcatatcttgcctgcatgtatgtctgggtaccacatgcatctctggtgcctgcagaggccagaaaatgccattggctcctctggaactggaattcccaaagtcatgaggagccacgtggatgctgggaattgaacctgggtcttctggatcatccagtgttcttgactgctaagtccttcctctagcccctagggcaacgctcttaaggagagtaggtgacaccagatgatgaaggctggtgactgtcacgtacacccaggtctgaggatcctggaccacccagcctggcctggcatatgtctgttcagatggtaggccatattctctgaggcaaagagaaaccttgctaggcatcttccttcttcactgtacaatgaggtctgtgttctccctgcccagcccacctagagtcaggagaaactcaaatagtataggataggatagctttgtaaagaccctactccgcagcagtatggggggggtgattcttaggtcattgtgagactttccccggggagcactggcgggactctctcctctctcctctctgtctgctcaagggacagggtctaatctctcctgtttaacacatacctgaccatctcatagctggctttacatgcaggggccacttagcctgcccagctgctcaaaggagaagccaaaatccacctagagtttcgatccagcagtcctgtttggctccagttggaagacttggagaatccggcttctgggactgggttcgagccaggtgacccagcccgagggagccggagagggttccaggcacacacctgccactcgggtttccaccccgcagcgtctctttcctggcttgtgcttttcaagtgcctccgtcctgcaagattgacagctcacttttgattggaatcagagtgtaggaagcggtcttttcaaatttcctgtgcaacccagcctgccaaaagtcctgccactggctgttttatttaccctggccaccaggcctcttgctcgctgcaccctaagaaaacagattgctgtcgggagaaaagtccatgcgtgtttcctttctggaggctgatcaagttctgaaagaagggtttcctgcagtccattacaccattttggtttgttttatcccgtctccacctgcagagcagggaattagcctgcagcccagggctgggccagcagatgactacagggaaaggagagctcgtgggcgtggagctttccacaacacaccgtggccttgttctctttagctaggcattgtgtgctgaggcccaagcccaaatctgaataggattctgtgtaacttgatctgttttctttctttcctgtattcctgtgagccaaatttaacttcactccaatctgtggcctgtacatataatgttctgccggagggtgggggtgggctgggagatgtgggagagggtgtatatgcttgcggttttttttttcctatcttcccctttctacattttttttttcttttgcttgcctgcgttgctcacccactgctcacccttggccgggtataacttaatatggctgtcttgtctgcagccattaaccctttagggaaagtgagtgggtttttttttttttttcagtctctccttagcaaaccacaaagtttcccaacccccactcccagcgccccgttgagaagccttggcattgcttgagttaacagttggcctccaggaaacatgaacttccctagaagtgcttgtgcagcaattaataggccttcactcagatatgtaaaaatagccccatgcttggaaacccgcagttgaaagactcggctcctaggagtcacctgactagtgttgggtacctcctctttaaaaggcttgtgtcctaaacgtcccagaaatatcccaacatcgatgtgggaaggttgccagggcagacagaaatccaatgttcaattaaaagctcctccagctgtggctaggtcaggctttggcagaggccaacagccttggggttcatgggtgtgccctgctgttaacatggaggtggggatgggggtgctgtctgctcctcctttctacttaagcagcaccccctgcttttcatgatggagggagaagacaggctgactaaagagggttggtaaggggagggctccccttacctcccagggctgtctcttccctccacgaagggccgaatattggtcctcaaggtgttgtatctgggggacagtcagataacgcactgacagcataatggtttcaatgctcactgcttccagaaatcacaaacattctgggaaaacaataataacaacaccaccacagaaccacgggccctatcgggaggggaagatgtcttgggtcattgcgagctatttttagaatggaaaatgtgctggctcagagaaaactagtcatgtgccccagtccaagtagggcacagtgaaccctgccccatgagcctgctgttcatttttacccagccttggcatctcttctccttcaagaagcccttccagccagtggggaaagcgcctaggcaagagccagcttccctaaacatcactccatgaggacccacacttgactccttctggggcccctgctacctgctgtcaagttggttgaagaagggtcagtgttccaatgtggctcacctgcttcacctcagggctaccgtggatgtccctgtggtggccctctgtcattttctttttgtaaccaccatggtatttttcaaggtcctggacgttcagtgcataactgtccctcagtggagttggccatgtttgcccagaaagagtaacccaaacctatgctgcctaggtacctgttgtgggccaggggcctacatggcttatccactgaccttgacacaatgaggaagatatgggaatggtaacaagggagtggtccaccggactggtacctcgaggcacaatcagggatacatatgaactagaatatgatgcagtcaagcctggacttttggaaaggtaccagctacatccctcgtcagctgtccagcagaggggacccagcagtgattgtgaaggcatcacatgtgtgtgtctgtacatgtgtaggtgtctgtgtctgtgtgtacatggaagccagagaacagcctccggcatccgtccttaggcactcaccgtggtttgtttggcttgtttttgttttctgttttgtttttgagccaagtgctctcattggacaagtgggctaggttggttggccaatgagcccctgggacccacccatctctccctccccagtactgaggttataagcaattgtcatttgacccagctgctttataatttgtgttctgaggcctgaactcactctatgttctggattatcactccaggatcttcccaggatcccagttgtggctcactgccgtacactggcccagtctggcctcagcattgtgcaagtctgaagctgctctcttccttggaagaagtggaagctttcctctagcctgtggttaactctacggctgcccctgcaccagcccagcccactcaggacaaaagcagttgcctccttcccatgcagtgggattgacaatctgcatcccaagacccaagtccttcattacaagaggccagcctcactgagcaccctggagtatattctcagctccaggtgtaaaactggttcttatggactctcaagactcaggcagctacttccttcttggacacaagccagtgtcttccccagaggtcacagctcagtgccctgtggttggggcaaagtgtgtactcttttacagaactttgggtatgctctgacacagcatgacctaggagcttgtctagagagggtatgggatgcccatcagctctagatctttcctgaagctagtgtgggaactggcttagagcacctgggtgttcctattcattaatgtatcagttcagaagccaatgctcttagacttagtgagtttggcttgaaccacgttgcctgccattagactgtttagccagtgatttcagaagactgtgtttccattcatctgtcccaatgaagaaggctttcttaagttaattgcctggaaataacaccaagtttcttgctcagaaaacgacaatcaaaccaaaagcttcctatcaagggcttttcttgcactacttggggcagtagccacttggggaggtgaggggattttaactgtgggtcctctttcaggatgtgctttggagttactcagagagaaagaaagctcccttcccgaatctcactaccctccctccgatggatgtgcgcagcttagattctgctctgccaaaactaaagtgtgcacacacggtatgtgtacctgcaatcccagcatctggaggtaaagacagaatgattgccatcaatctgaggctagtcagggccttacagtaagaacttgtcttaaaaaacaaacatagcagaaagcctcagacacaaagccacagatgacaaatcttaaggcacactgcacagttcattcagatagcctaccagccatattttgccttcctggtttctttctaacaccttgaagtggtaaggaccttccttgccatcaatttaacatgttaatgttttttaattaaaattctgtatcatctaataggtcacagaattgtgggtgatgagttctttgttctagaacttcctgtgtaatgaaactgccatccataattgttttcctgtggactgcttattaaaagaagtgatttttgatgaactaaactaggtaagtgctcgcagcgtgaggcccattgggaatgaagcccttaccaatcacagctcccctccccccccccccccgaggtggggggatgcaggaggatgtgtgctttcagatgtcagtttcagctgattgtttctgaggctatgtgaccattattctgtatcctgtggtgcgttttatagactgatatcaatttgtagagctccattatggatggatgtctccagatgagtgcaagtttcaaaccatggagtgaagatatggagtatgatggcgttcagagggaaagtggagaagggtactaaactgtgacacctttcacctaagatggggtcttcctatactgggggacgggaatcctgctgcgcagagcctggagcaggcaaagccaatgaggcctcttcctcccacttgtggagacacctacagacccacgagaggctccaaagccacagcagggctgtggttttcatttgccttcaatactggagtcatcatgtaaaaatccagtgatttctatctcagcaaaactcagaaaagtagaccacagggtctacttcctcccagtgttagtctgctgaagccattattagccatttgctcgaggaccagggctctaagccaccatccagactgcttgctcagctctgtgctggagttaacagtgtagcttcagattgtagctgtaggtccaaagccaaaagaccctgagagagcacagagcctgcaaaaagacacatgcctcaacccatgccaacccttcctggggcagcaggaggcgggggtgggggtgaggggtggggtgggggattggtgttcgtaatgatttggatataaaaaaggtctctgcaagacttctgggttgaaattttaggcctcagctggtagatccaatcattgagaagttattggttgattgagggttatgatttaatccatgagtgtgattctgatgggtatagaacttgatgtcattagtgggaagtgaaggaaaccaagcccctgctcccactacagtgatcttgccacaggcttacaaccaatagaacatgtcaactatgagctgtaacctgacccaaaggaaaccgtcattcccccacccccgctacttttgagttgtttgcttaaggtgttctgtgtcctctctgtgtgagtagctagcatactgtctttctcatgggccagaactcaaaattcaagagacatcccaactgtagtctcctcctgggctcatgggggcggggggggggggggaagtaagtcgagaggctgaactgcagaaaagctgtgggaaggtcttgagtttgtctgtaactaatcttgaaccattttggcttttaaaattcacagcaaatccggcccagtcaacacatctgtggttaagtgtgaggcgcaaacacacagactgagtgtggatgggtttttcctcccgccccaccccctgactcctaactccatccttaccctgcaagttgtaatcttatcatgtttagctggttccacataaacagatctaggtatattttcagctgagacctgttaagaacagatgtgcacatggctccccagtgctgatccatttaagtggggtttccatcaacagcttcagttctctccccttccttgaagggggaaagaattaaaatacataacccccgttgaagtgggtatcacgtacttctgggttctgggcagcttgggtttgtcaatggcttccaaacagcaatctggctcctgaggctgtgagcacagagggtgtgtttgatggacaatgttggggtcgggggcacacacagtgagccagctactccggttctcccctgcacacgcgggaacctttccttgagaactacaaatcctctgatctgaggcttgagaaagctcttcacctcccaggaccgccaggcagcatggggtttggtggagtccagatgtagttaatgaaaattagccacatgtggaagggcattctgtctgattctacttccatgaagtgctaagagcagttaactttagagagatgccgaatggaagctgtcaggggctgaggggagggaagtggacagcgattgctcatgggctgtagagtcacaatgttgcaagtggcctggagagtatgttacacaacagtggggaggtagttaatgctacagagatgtgttcctaaaatggttaacagggtgaaggagataaagactggaactcatcaatgtagccaacagcattagtgacttttgttgttgctgtggccaaatacgtgacaagaagcagttaagggaacatgggcttatttttggctcgtgatccacgttggtgtgggaagagggggctgaaggggcgggaagagataggtcacgtgtcacactcagtcaggaagcagagggagatgactgctggtgccagcttgtcatttcattagatttaagcccacagcgaggtgctaccttcaattaagggaagtttccccgcctccattaacctacaggcattacccagaatccctcacaggcattacccagaggcctgtctcctaggtaactctggatcctgccaggctgattacatcaacatcgtgtcacttagggaaggatgtggggggatacagagataggcagacacctagtgaggtgtggcctgttgctcaggctggccccaactcaggtggggtgagcaaagtcgggttatgattgctcagattcgactccccaagaacagtcctcaggtgggcctctcacttctcccctgagagtttggcagcctcctacacattgcaaccatatggggccatctgtggtggtatcctcactgctcactgtgactcagagctgtgtcctagaggcctctcattctcttgcagcttcaggaaggcccttctttctacctccagttgtctctgggtaaagcagagttcaagttgtcctcttgtcagcttggtgctagccttgggaagcagggaagggggtctagggtagggatccaatcacggtgggcaagcggagcgaaggaatcctgcttcccaccttggtccacccacgtccccggcagcgtgggtctgcacacaccgctctgcttcgtttcatactgttaaaaggggagcaaaggattggggcgatagcccaattgataaaatgtttgtctcctaagcacccacagagagaaaggctagactctggggagaccaaggcaggctgatccctgtagctccccttgaggcttccaggccagtgagagattttgactcaaaaataaggtgaccaagactgggctgcacagcctctaactacctttggggtgggggggtaaagtcttcctaaatcctgtcgaacctggcagcctcttcaagacacagtaacatgaaaatgtaatgtgcctgtggctctgccgggacctccagggttgatataacctcaaacgtgcctctggaccctcgaggtggtaggcaatgggctccaagagcagcgagcagtatggagaggccctgaggctgagtctaaaccaggcgaggtaggcccttaggccacctgacaggacagggtcccttagagaggtgtgagcttgctaagcaggaaggagagtggctgctttagggggttagagcagcttcctgggggcagaagggagctcatttgtcttaatgaggaggaaagaacaaaaccaaagcattcattagcactttcagcaagatgaaagaaacacacttgctggcttgctcccttgctcatctacaagagtcagtggctacagagaaagaatctggtagagaattctgctacctgatggagggtggctcctgggctcctctttagttgttttaggggcaccttgtttgcaaggtgttcagccccatgggacctgcttagtagccagtgagagcaattcagacttgtttttttatttttttttttaaatcttaattgtgtcccacctttccctatgtctcaagttcttttacctagttgttctcttcactggcaattttagcttgtccgagcccaccccttccctcttgttgcctccccccgccccgcccccccccccccgccccactagaacattgataggtcttgatttctgcaagcaattctgaagtttccagaaccatgataccacttagttccagaacacacttggctcaagtttgtataggatagctcttctttctttccaaaaaatatttgtgagtgcatgcatgtgcacatacatgctacatgtatacctgtgtgtgcttacccttacatctaaaagggccagaattcagcatcagattccttctattgccacacctggctctttgtgtagggattagagatctgaactcaggttctcaagctttagtagcaaggattttatctactgagccatttcccccaccctgaagtagcgcttcggagcacaagttagaaattgctaaaatacaggctgtagctggcagtaaaggagttcggaagaagtacttgaaaccactcagcctgtaagcaggtgtcgctgattgctctgtgtgtgtgtgtgtgtgtgtgtgtgtgttttattgtgatctccagactgggatcctgctgggatgggcagaaaactccccctcggtccatcttctcttgactgttttcagatccccttcaccattcacaccgatgtccccattctctcggcttttggagtctttcatagccatcccttactatttccaaatattgccgggatcagtgcataatgggtgcattatgggtgctttactccaagtgattggcagcttggtgacctttctttttagccacaaatgaaaggggacttacaggacatgtgcacgcctgactaatacacacgctcttcgtgaaaaacaggataaattacagagaatggcagcataatgattacagaaaggtatatgaggcagaacccattagtgagctgcgttttgttcaaaactgagagagaggcaggcagaataacacgcctttgtgctggaacccactgagccatagcaatgagtaataacgcagccggggagctgtgcgcactgcctccacctcttgtgccgattttcataagttaataactcaagcgtggaaattgtttcagactgaacactggaggtagaaactgggcaagtggtgtgggaaacaacttgttgttgttgttattgttacttaatttagcttggttgtttttaagtgaagagcggcaaccaacgtcactatgggttttctctggtgatgcgttcctgttgaacctgagatagtttggattctgttacaccgggttcacttctagtgatgacagcagcgagcggcctctcttcttacaggtgttcctttctgtttggtgcaggtgggattcttgcgggggcagggatcgagtcaaaccttggaaatgacgtcattctgaactcatctgcctttatccagaagactaccaaagcaaaccagaggaccagagaacagcagctgctctggacaaagaggggaggacacccacacccacataccaagttctggttgacttctacagcagaagaagcaggagacacaagaaggtagccactcctattcgtggggagggaccaggtttcatatgggccttttctttggttggaacaggagatgttcacgatggaagaaaacagaataattcagtaaacacctcgacccacatcccccaaataaatgatcacttttacatgttacgtccccataccaactttgaaaactaaaaacttaatgaaacacagctcacaaacatgaaattatctttaagttcataaccaagcaaagtgagaggctagatagaaagggaccccccacctctctcatccttcaggaacaggatccacagaagggaattcccaggcaagtcagtaccaatttttgtcccacagtacagatgagtcccaacatggggcgtgggaatgagagcctgcttctcttattctggaccccaagtagaggagacagagctgaggatgaaccccaaggcagcctttgcccagccccagggagagggtgctaacacctgcaggtctgaagggaaagccagccaggcagggaggcagggcacagaaacaaataatacattctttagggagtgcaatctaatgcacgccccagccaagtttcattgaaaaggataacaaaaatctcttcaccaatttgccaccttgcaaggacaatttaataatgtttattttgttattagaaaattgttccatttgtgaatctttagtaacactcctccccaggtgagtccttttcctctctctctctctctctctctctctctctctctctctctctctctctctctctcaaactggccttttctaggtagctgaactaggtgtctttagcccattgtggagtttaaccagatcaggtagacccatgtgctggctgaggtcaccatcagcctgtatcctggtccattagctagaatcccagccagccaaggctgaaaatactcggatgcaatggagcccccggcttacacctggcttctaggttgatgcctctgtttgtgaactgatacctcgcttaaaagtaataagaggtcatcatcctgagtgaggtaacccaatcacaaaagaactcacatgatatgtactcactgataagtggatattagcccagaaacttagaatacccaagatacaagatacaatctgcaaacacatgaaactcaagaagaacgaagaccaaaatgtggacactttgccccttcttagaattgggaataaaacacccatggaaggagttacagagacaaagtttggggctgagacgaaaggatggaccatctagagactgccatacccggggatccattccataatcagcctccaaacactgacaccattgcatacactagcaagattttgctgaaaggacccagatatagctgtctcttgtgaggctatgccgaggcctagcaaacacagaaatggatgctcacagtcagctattggatggatcacagggccccaaactgaggagctagagaaagtacccaaggagctaaaggggtctgcaaccctataggtggaacaacaatatgaactaaccagtactccccagagctcgtgtctctagctgcatatgtatcagaagatagcctagtcggccatcattggaaagagaggcccattggtcttgcaaactttatatgcctcagtacaggggaacaccagggccaaaaagtggaagtgggtgggtaggggagtgggggggagggtatgagggacttttgggatagcattggaaatgtaaatgaagaaaatacctaattaaaaaatattacaaaaaatggtcatataatatttaaaaaagtaataataaaggaaggctcacgcaggcctaggtgttcagggtctccttagagaacaaggatggtaaagaaacacagtacttccttgagattctcatgccctccagactctcccgcccacctggagaatggttgcacagccttgttgcctctaaagacacaaacctcagggtttctggcactagcattgtattctcaccaacacagcatccttcttgatcttactgaaccctttcccctgcctatagtcagagatccggctctctgagaactctctggagttgccctttccagctctccttcagttaggcattgccttacctgtcctagcacagtaaagggaaggaaggcggagcaccaagcactgagcactgagcacttaatggtctggtagatgaattctaaattcctgggagaggggagcttgctcttgctggaggcgactggttgtagatagctgacttcacaaaggcaccagggagagagaactggggattaggaacagtgggggatggtaggcagaattaagacagattccttagtgagaaattgaaaagattttgttaggtctggagaaaaagcccctctgttctgggtcctggctggaacttatgtcagatgctggaattcactccccctcagtcttatgggtgcactatggcatcttgctgtgactacatattgtcactatatagtcagtctttatcttcactcacatctgctctaagtatttctctttaatttttttttttaatcacattcagggtatgtatgtgtgtgtgtatgtgtgcacattcattttgcttatggcactttcagaccttagattttcattttctccttcctatttttgacttttgtttcatgagtacaagagtaccaccactgcactttgaaacattcttatgatagatgccttaaaatgaaaatgtttgtcagatgggctgggagtggtagtgcatacctttaatccaagcactcggtaggcagaggtaggcagatttccaagatggaggccagcctcgtttacagagtgagtttaaagacagccaggtctatgcagagaaaccgcatccaaaaaaaaaaaaaaaaaaaaaaaaatttgtcagataacattgcatctccgtattggaatttactgatcttttttcatttggtttaaaagatttctggactttagcaagagtattttccattgaaatcttgttatctggaggaatgtatttaattattgtcttctattttaactgggtttcttacagagctcacacaggggaggttggatagagaggtacagctcactattgccaggtagaagtagaaggccaagttctccaccagcttctattgacatctgaagagaaaggctccttcttgctggtgggggtagaagcccaggctccctgacatcagggaagccctttccctttggacatggatgcaaagtctcagctctcagtcttcttgaacaccaatctggtgaggggtgggtgagcagagaagtcccctggtgacagtgggaagctaggcgtcatgtccctgccctatgtctatccgcctcccacccatgcatcccttcccgtctcccctccatttaggttgggcttacattttctgtagtggatcctggagtagaccactactgccttagactgttttctaggccacacccctttctaggttcttagagagagtaggtttagaccgtcagtctctttcttcagttccacacctgtgatatgtgagacaaccataggccgtgctgttcctctggttcccaggttgctagtcagcccatcttctcggctccttacagcgccttttgtattttccctatgtaataatatgcacacttcttagtgatgctcagcagccggaagggaaagggatattttcaacttcctgaaagtggaagttctcatctttcttatgagtacttgtcaaaaaagttcttcccacttgatctctgtttcacctcctaaggcaaatcttgtttttcttaaaataaaaattaaaagaaaagaaaagaaagaaagaaagaaaattctagattagctttacctgctctagaatgtcatgtgatcaatgcaagtaacaactgtgcactcatcttctggactcttctctcagtgtgctgtgtttgagcatctgataatattttataattcatgccctcctaatggtcacaggaagtcagggcaagaattcaaacaggaatttgaagcagaaacactgaagaatgttatttgttggctcattcatgcttcattagttctcttacacagcccaggagtatgagcccaggggattgtgctgcccacagtaggctgggatcttttacatcaattacaagacaatctccacgaatgtgctcttaggccaatctgatctaggcaagccctcaattaaaactcccttctcagatgactctaggccgggtcaagttggcaattttattatattaattttataataggttggagttggcccagtgattaaaagcacttgttgctcttgcagaatactcagggttcaattcccagcacccacatggttgctcacaactgtctgtgattacagatccaggagatctgattccctcttctgacttctgcaggcactaggctggcatgtggtgcatatacatacaggtgcatacacataaaacaactaaatctaaagagaaatgaaaagaaattagacctaactagaacacacattgagcttgcatattccttccttccttccttccttccttccttccttccttccttccttccttccttccttccttccttccatctgaacaaacaaacaagcactccagcctctatttagtgaacctgtaatctgaattaggaaccatttaggataattatcagtagggagggggtctggggacctctcctgcagcagccaataagtggtgacgcagaataatataaacaaggaatggacgtgtgacattagttagcaacacctgtcacaaaggttaagtaaaactgggtggatggatagggagtgtccagtggcctttggggagacatggcatcatttcagtactagaggtcagaggaagcttctgggaatgctgaatagaagacaaccctattaggagaaggactaggaggcatcttagggaatgctgggtttgaagaagacaggagactttcccccccctttttgtaagcctgtatctttaaatgtgttcatttcttggaatacaatgtatcttaggggtagtttacacatcacccatgaaccatggggcagacccaaggcctaaggaaggagtctccaaccaaggctgtgtggtgagtctcactgcctgctttcagaaacctgccaccacatcctgcgctgcccccccccaccacctttccaccacaccccttcttcaggggcatccccacaaggagtggcagtagagttagaaagacaagcacatgtggttgctagggcttcaggtcacgggagtggtgagccgttcagtgctctctgcttctagatgaggcactggtgatccagagaggctgagcaggtggctcaaagtgggtgagaggtgagccctgaatggtaaggtggatgcgtgaggttccagtccccttagcttttacccttccttccagctttaggattcattgttctcttcagttttgaagtgaggggaagaatgtcctctggggaatcagagcttgaagaaagttctagaatcaatcttagacagcccaatgtcagttctgggatgtttagctgggaaggatccaggctgtggacctccccatggaaggcgtaggggatcagggtgggaggagggcggtggtcatggcagctgcttggattctggaactgggaaaacctgggctcaaatccaggctccactgactgcgagggtttgggcatattgttggaggcctctatacctccatttccacacttacaaaacggtgactaacatctccctggagatttgattgagtttcccaagacaaagcattcaaagtgcttagatgctagcaggcccagggcaactgcctaataggtactggctgctgttttcattcaccattgttctggaaagcaagacaagcattgactacacagggaggtggccaggagccgcccaggctgctccttccttgctcagcccacgacctgcaggagaatattggtgtaggggacccaacttcctgtatcagtgggactgtgtgacccgaggggtgccttccaacctgcagggtcagtttgcttctttgcttccatagctgcctcaggcagcagtggcggagggagaagcagctggggttggcgctcagccactccagctgtcgtctgtggtaacgtgtttatctgctccagagggatagagatggctgagcgaggaagcatgcgggaggctgtacctcacggtgacttgccagcttgggtgagttcaccgtggacagcaggcaagggtcacctcaccatgggttgtggtaccctctccatgctctgcaccaatgagaggcagtttgaaaacttattataaacagattacatttcatatcctaatgtggctgctggctacctgcccgtgaattttagcctccaggaaagaaacagttccgtgagcagagtattctacactttgactctgcttcttaaggcttctcccaggtccctttaacaacccccccccccctcctctgggcttaaccagaaatgctggaaggtgctttctacccagtcaaagccaatgagttgtaccctgcactaacacacacacacacacacacacacacacacacacacacacacacacacacagagagagagagagagccaggaatccagtacaaaccaaatgcccacagcagcccaggaacaatggaaagctgtctccatgtccactaagggatctagcacacactccgctgatggtacctctgctccagtcagcagctcagatggccactctgtacacccagatgtttggtctggcacagcaggcagctgtcttctcctggcttttctttatcttaaagttggaggactggatccacaacaggattctaggtagaccaggagcagtgtgagtagccatgggaatgttctcatttgcttggggttcaagagtatacatacatgttaactcttaacacattaacactcagacatgtttatatatgcatttgtaaatatgaaaacatacacactcaggcacacacaaagtccccagtagcaccacatactcacagtcccatgggaactatctgaggccacttagcatttatttgtagctcatctttttttctttctttcttttaccccctccttaaacatgggtgttgcttatttatttatttaatatttatttaatgtacattggtgttttgcttgcgtgtatgtctctaaatgttgtgtccccaggaactagagttacagacagttgccagctgccatctgaatgctagaaattaaacccaggttctctggaagagcagccagtgttcttaaccactgagccatctcttcagcccctcaccactaccaccacccttttttttttctttctgaggcagaatctcactatgtagccctggctctactggaactcactttgtagaactacttgatcaaattcatagagatccttctgtctgtctctctgcctcctctgcctctgcctctgcctcctgcctctgcctcctgcctctgcctctgcctctgcctctgcctctgcctctgcctctgcctctgcctctgcctctgcctctgcctctgcctctgcctctgcctctgcctctgcctctgcctctgccatctgctgttgggagccgcgcccacattcgccgttacaagatggcgctgacagctgtgttctaagtggtaaacaaataatctgcgcatatgccgagggtggttctccactccatgtgctctgccttccccgtgacgtcaactcggccgatgggctgcagccaatcagggagtgacacgtcctaggcgaaatataactctcctaaaaaagggacggggtttcgttttctctctctcttgcttcttgcactctggctcctgaagatgtaagcaataaagctttgccgcagaagattctggtttgttgcgtctttcctggccggtcgtgagaacgcgtctaataacaatctgcctcttcaatgctgagattaaagcatgaatgtcaatttagtagttcatctttaaaaagtctgaatgactgtttagaattaatggttgaatgcttggtccctatttggtgaaactatttgggaaggattaagatgtgtggccttgatggaaatgagctttgtggcttcaaaagattcaccatttccagaacactctctgcctcctgcttgcagatcacgatgtgagctctcagttgtcgctgctctgcctttgctccagtacctcagactccagcactctcgagctgtaagcccagataaaagccttcttctacaagccaccttggtcatggtgttttgtcacagcaacagaaaaagtaactaagatgctgcatttgtgtgtctctgtcactggctggtgtggctctgcagccgtggttctcgaccttcgtaatgctgtgactctttaatacagttcctcatgttgtggtgacccccccaaccctaaatttattttcgttgctacttcataactgtaatcttgctactgttgtgaattgtaatgtaaatatcttatatatgacccccaatagggtcatgacccacaggatgagaaccaccggtgtagagggttaactgctggagtgtccatgtccctggaactctctcgttacagtgaatggtacagagacacactaatagttacagagatggagaaactttattaaagtgcagacacgggaggcctggagctgggccatgtctcgcctgtgacccagctccaagacaggagaaagcagggactgaggtgaagtccctgctgatcttgaatgggcccttaatgcagtggcctcgtttcccatctaaggaagcatgctttttaaaatgagctgtcctggctgaatgaagctcaggtggactgtagaggctgttgtctttccccacagccttttgtgtgttcatctctggaatttcccctctgctggtaccctgccttctcaggcccttgcagaacagggtcagcactcggcttagagagctgaccactacttgcctcctgcaagggtccagagggaagacagacaagggagaagcaaactgtgaccagctagtactagaaagccaggaaaggcagagcttgagcccaggggcaagggaattcactgttgacacccacaggcagctggccagacccctgacagcctcactgccacctccttcacaggatgacagctggaagcttgatcagccaacccttccataaaacccccgagtggctctgatctccattctaggagtttgctggaggaaccaaagagggcatgccaaggccatcccgcttgggtcttggcacagagcagtcaccaaaggccaaaggcagattcagaggccagcagttgaatgtgttgatgctgtaacagagcacaaagccacaatggctgacaagaagctgtcagggccaccgcaggtctgtcctctctcgagggcctagcctctgcgagtgctgtttttagagtggggcaagacagacaaatggtgggatttttatttttaacctggactgagcagtaggatgaggagaccctgagctgtgaacggggtccctgccatgaacacactcaccatcagttaacacctccaaagcttgaggctggccagcagctggcatatgttggctagttccagttttaacgccatactctcctctgcttcccactaagaggaagcagagtggctagaagattgctgttgtggacttagctcatacagagctgagggctctcccagacagcagagaagggacttctccattgaccctactcctcggactcacccagcagtgtgacccgtcagaagtccaagtggatagagtatgcttgaatgttcagtgatttgcctatagaatctgcccgcccctgaagaaaaaagatgtgggttttatgttttacatttgaaatgtattttaacagatggcctgtacacattgtacaaagaaaagatccaagccagtgtgcagaaaagggaccctcctgcctctgtctgtcattttgaaatatatttatatgcattatgtgtcagtgtgatgtaggaggtggtgtttggatgccacgacatgtatgtggaagtaaaggaagattttgtgaagtcatttctctcctccacctttaagtgggttccaggggctcaaactcatgtcaccaggcttttgtggcaagtgcctttatctagtgagccaccccactggctctgcctcttgaacatttgtttttcttctactgcgatcatattccccaggatccgatggagctttttttttttttttgacacacgcaaggtaggacactttagtttgtgacatgaaggacagtgtgctgtgccgctgtttatttaaccaatttcagaatgtcagacattcagggctgtgtttagtcttcagtgaatgcaagcggtgctgcctaaagagcttgatgggtacacaaggcttacacctgcctgagcataccctgccatcggttttccgaagctgagctctcaggtaggggattagcctcagtagtttagatagatactgtcaaatcatgctccaccataattgtttcatcttacaagcaggaggcaggcagaaggatgcagtgtctagacactttggatatgacacataggaaaatttggcagtcctgaaggtggatagtgatgtcttggtttaggtctcagttgcatttttcttttccgttctgtagtgttgagtattccttccaatgcatatgatactgtacttcagtctccacacctcgggaaccagggtggccacatgatctaaggtgccccgtctcgttagctcaggtctttgcctgtgtgtgtggtggatgcttttatgttgtcattgttgaattttttttcagttgatttattacagtctttaagctagggattctgtgagttgtctgagatactgattttaagtaacttgaaggtggatttgcatatgtgattctgattggtttggccctggggaccgtgatgattgccccacagtgtcagcttgagtggatttcagtgtgactctgaaggtgtatccagagaagtttagctgaagagggaagactcaccctgactgtaggtggtaccatcgatggaccgggattccagactgaatacaaagagggaaaggagaaagggtagtgggctggcagggttacaggcttacaccatcacgcttggcttatgtagtccaagggattgaatccaaagcacaatgaaggttagtcctgaaccctatcaactggccaccttcctggccctagccttgcacttacacaaagagaaaaatgtccagttgtaaattgctttctttctggtagttgtctataatgatgggcttacaggtgaacatcttcttttgggggaggcagggaagcaaagacagagacaggaaaaaatggctctagggctggagaggtggctcagctgttaaaagcacttgctgctcttgccgagggctcacatgccatcctcagcacccacatcacagtggctcacaactgtttgtacttctagctccagtgtatctgatgcccaagggtgttcacattcatatgcgtgtacatgtacataacatgcagacacacagagaagtaaaataaatctttaaaagaaatggaactgatatcaaacaaaggcagggcagagtatgtcctgagagtcacagtgggtctcttatgctgctggaagctctgtgcttcctgaagtagtgacaggaaatgattacgtcagcctggaccagatgtggctcttcagaggctatggcacctgtccacacatactgcatgggtgtcaggttccagggaggcctgattcagccttctgaaacagcacacacatctcctgcctctccccgacaagaccacgaggaagaaaataagaaaattcgtgtgcccacatgacttgggtccttgggggagactcaaggcttccagtgggcatcaacaggcaactggggagatgaaggcaggaggagtttatttttggcttcatagaaagttttgggccaacctcagtttaaaaccctgtcttaaaaataaaaataaaataaaataaaataaaaatgtaaaagatgtatttcattttacaaatgtaatgtgatcaattgcttgtaaacacacacacacagaacacacaaacacacaacacacatacatacatacacacacacacacacacacacaccatctcactaaattaaaataatctcagccaaccctcttgacagccctgggagcaggaattatgattttcttcagtgaataagcaaggaaaccaagtgcagaacttgatgccacagctagttcaggaacatgagggtcaggcccggcgtgtgtaacagtgtaggcccatctgcactgtgttccttgtccctgaacactagtacttactgtcttctcacccacagctacaacttggctgtggtttagcccctaaagggtcatgtgctagttgagtggagaggcgctaagggggagggacctttaaggggtggagcctagtaggaggcagttaggatgtgactgggtcaattcttgtagggacagattgctagatgagaccgtgatgccttctttgagtcctttgctgtatgcaccacctttgacacagtgtgccatttgacatgatgtccttgccagagccaatgccttgaatggtcagaactgtaacctgaataaaactcttttctttagaaagtgccctatctccaatattctactgtgataacacagaaagagactgtggaagtcactctgagggaggcacgttgtcttactatttttatttcatgggtttggctgtttatgggtttgaatatttttctatattttataaatcatttgtcttgattttcctgctgtcttttcccatttttcaatatctttctctatgtgtgtatgtgtctctgtctgtgcatgtgtgtctgtctgtctgtcatacatgctgtctagttttcttcttacctttactgtggtcttttccagcttctgagacattttagataatcttgaagtgcccctcctgcctgtctcttgggtgctcacattgcagacatgaacctttctgcccagctggttcccattatttttatactcaagaggtttgcatccctcccacataaagacaaatattcattcctatctttaaggtaggaagtgggtttgtagtctcttgttctgtctagaagttatcggtatgttttttttttcttcaaaagtctcctcagaagaacattgaccagcacgcctgcatcctttctgttctgacacacttgttacctggatgacttctttctcatcacccacgtgccaagagtgccatgtctcatctggaccagagactctgaggatcacaccaacagagacacaaatgacacttaaagaaagccacatcagcttttacaacttaccccccaataccgaatgtcatcaactcaatttaaatcattggatggttctgttctcagggccagagagtttcactaaacttcgtcgaacccttcggtataactgtcaactgtgcagagtgtgcttggtgtctggattctcagccttcagtgtaatcatgtttacatccccaggtgtcagaaaattccccctgacccttaacccccaacccttagcatgttggtgtcttagcttttacaatgtcattgctggacttgactgcttttcacaaaggtagctgcccaactagccatgccccaaccagtacattcttcttggttgcattcttaaattctcagactttttcttaacaaatgtgacaactgaatgtttattggtgttggtttggacttcatttaatcctgttaaaaccagtttgtgtcagtcacaatctggtggttcattgattgtccttctctgaatccgctcaccatcacatttgacacctaggctttcattttttccccctgagtcagggtttttctgtgtagccctgggtgtcccagaacctgctctgtagaccaggtgaactcagagattcacctgcctctgccttccaagtgctagaattcaaggtgtgcaccactaccctgagctttctacatttttatgtctttgaatatcaagtttgcagtgagaaaactgaggctcagggtggtggagtcacgtgaccaaagtctcaagactccagaggggagctgagctgagtggtgataagggcctgtgcttctgaaaccagggcacatggccagagcagagtagcagtcgacagtgacaaggacactagtgtcacacccaacagtccactatgaagtcacatacctgactcatgacaccctagcaataccaccagccaatccacttcctaacatctaaggatctccaaggactccagcaaatggtggtttggggagaccaaggtccctagcacagatctaagagtctccattgtggaacttcaaagtgttcagggttctatccgggcatccgtttgactgggaatccttttttacactgctccatatttgtccatttcaaaaatgagaatatactttgttcactgccttgatgaaattgatttcagtttaatcagttgcaccctgtttaatagacctgttataaaagatgtgcatttgtgtctatcaaacccacgtggtcccctgtattctttctgaaatgttgtcaatcctcgtggctaataagtctacaatagtccaagaattcctgtcaggcattcactttttataaaactcactcaattttgcaattttgacagtttttccaggagtggacttccccacaattagtcacttagtctaattagtctaagagcagctctgaaggcgttcagatgttctgggctgatcacctattgtcattcaggacctgaatagcaccttgctcatctcccatcacctactgtttctcgctcatgtgtatgggggctggggggtgtatggtgtgtgtgtatatgtgcttgtgcattgtgcatgcaaatctgtatgcctgtgcactcctgtgcaaagagaggagaagggccttcagtgtccttttctatcaagctccacttaattcccttgagacaggtctcacagagaccctgaaactcaccattttccagcaggccccagagctcctcccaaccccctcggccttctcttccaggttaaaacaaggtccaagaaacactgggaccttgcccttagttccctgacctacactgagtgtgacaatgggatttccctctaggagctgttgtgaggaccatcggctaccacaccattgtaattaatattgatatcatttgtacatgatattgaaaagctttgaggtcacagtgtgatgatgacctgattaaacaggtttgaacatactgggggttcaaacccagctattcacgcctatgtaacatgtctctaccaccagaccccaccctgctttttcttttcttttcttttcctcttcttcttcttctttttttttttttttggatacaggattcatagttgtcctgccaaaaagaatctctgactccaaggatgttttctcaagggattcccgcccgcactgccagttaccatcagcaggactcctgactgcctgactccactccatttctcatggaagccagaaggtagtgcaggctgtccccacccccagggtgacaaagctgtgatgaggagccaccccagaagagggaactggcacctcagcctgagaactggccctatggctaaccgagtagaggaagcttaattctttcttttttaattttgcattttattttaaatttttattattaaaatacaacaaacatatcaataatattgagtattttgagaatcaaataatatataaaaaatttgttcaacttttatattcatatcctttcataccctaaaagcatcattaatgaatatttaatactgtccataactgaggattctgtatctaatgttgaatactaaattgtttcaaaacatacaaaatatttcttgggaattaggcatagtaaaagagcataaaatattaaaaatgaatcattaagaaatacattcaaaagtccttatatgataccacctgacatagtgagagagtatttaaaactcattctatatctgtgtacatggtctaacaatccgcttatttaagcaagattatcagtgtttctaggagagaaattattttatcagtaagcatattttaaaaatttcaaaatagcaaaaactttgaagttaaacattaagaaaatgctaattttaagcatgagaaaaattattaatactatttccatggtgtttgtagaccatgaccgtaatattctcaactgttaatattcaacagacagaatagttattttaagatatatttcattgttttctctcccttttcatttctgattttattaatttggattctgaactctgtgccctctggttagtctggctaatggtttatcttgttgattttctcaaagaaccaactcctggttttgttgattctttgcctagttctttttgtttctctttggttgatttcagccctgagtttgattaggaaacttaattcttagagaggcgccttccccactacgcctgttgctactagagaggcaactcttccctttccacagagcccctgacagacctgaggagagtgggtgccagtgagtcctgagtctcctgcacagtccctgccttccctttatctgcagcctgggcattcttgactcttgtctgacatctcccacccccttcacagtctaagagttggtaattaattagccttgaccttaacctttgacaccacccagccatccagatgggttatccacacctggtaactgacctggggtcacccctccactctgcccagctgccgccctactgggctgaattttatgtttgcttgtctttctctgaatcagatttttttctggtcacttactatagctgacagctccatgctggcatcactcttcagtctgaaacctacagctttttttcctcccttactctgatatactttcttcatttgcttttcccattgggcccaagaatggagatcagggtgtgctgtctttgaatcaaggtggaaatgtgtctacagagtcccctccctgccccgggtatcctgagctactgagctaagcaatgtggtaaaggattctgtcctgggctgacccaggctctacagctagcaatacagattccccttgaccccagggtttcctccagggagcccagcatcctccctatgagctgctcctcctgctcacattctttagctgatgcttttgtgctgggttctatccttgtggttttctgcatttattgggggctttctgcattcctcgctctgaggttgccatttgaacagctctctggtcaccctggctagaattcggcagctcttctcccatgttggctggtacaccctgcttcctgccaggaccctgctgctctcggggtggatctgggctaagctccagaagacacaattcccagctctgactccatccacatgcccagatgttcctctgctcatttctcctctcttctcttccaaagccagggagcatcttgagtgagagaaggcacaagcgggtccacagcactcattcggtccatttcctctcaaaaactttgtagcaaacacaagggtgggcgtggagagcagattcctcccaacttggaggggcctcacaagccagcgctgcaggccttcactcccatatcatctctgaccatttggtagtgactgacctggctacgacatctgtgcttaagaagagtgtgcaatgagggattctcagtgcctttggagctcaatattttactggtctataagcaacctgctacttacgttccaagctgagaacctagccgccacacatacagcagtgtgttcgaagccacagttgagcagggcagatctgaggatgaaatccaggttgtccagcctttcctactggtgtctttaaagctgaaagctggtctcttaggaggtcagatgactgcctgcctcccagtctgtgtctattgctagctacccggagtgcaggaaagggggagaggtgggctggatagggcagacagggtatgaaggcagaacacaaatagaagctgcaggaggagccagcacactgggtgtgaaccttggagacacagcagagccagagatcagagcccctgggaatgccagttggggtgggggtggggggtgtggtgaggtggggtggggggctgccgaaactgctgctgggggtgggggtggggggtggaaggatatttcacggggccagagaaaaggagtccattggccttagtaaagggacaacatcttgttttattaaaagcctgttgctggctggataagccgtctgcctgctgagtgggcaggggcccaatattactgtggctaattcggagccagtgttggagagctgacatcaaaccaggaaacgctcgcgcgcgcggctctctccctctccggctctccctctccctccctccgcctcctcttctctcattcttgagcttgaatctactgtgcatgatatgtgtgcatgtgtgtccgtgtgtctctctgtgtgtgacattatgtacacttgctgggagttcaccccatggctccctcctcctcttcctgtcctctactccctctgccaagcaccccagccccacctttgcccctggcctcctcagtctccgcccccagaagacttgaacagagaagacccagactatggcctggggttatttactgagacgcctggggaggaaagtttcgaaatgaccaaacccacccctttccagatctccatttgtaggttaaaagaaaaagtaaaggaagtcatttcaaaagaaaccaggaggaaagcggctctcttcggcagcatgtgtgattattattaatattagacttgtttaaggcaagggaaaaatgtaaaatggcttttttcctgtttttatcgtagttttttgttgttgttggttttgttttttgtttttttgtttttttgtttttttttttccttttttcttctactgtcttgggagtcagaagggcaaacagtaatttcagagtaagatggaagccatcatctccttagttcatgtgatgtctttctgggaattgggagagtgaatgagtttcatgtaaacgcctataatcacttttcctgctaaggttttagaggactctgagtctcccaatttgctgtaacttaaagtcacccaaattgcttccacttttaccaaaaaaaaaaaaaaaaaaaaaaaaattaattatttatccagattttaagctgtaaaaaaaaaataaatgaaaaagtttttttcactggttggttgtctgaggtgacttatttaattctttgataaggttaaagcaaattgcccctatataaaatagaatatgataatttattggcatctctgtaaccctgctttcaaacaataaactttgaatgaagagccagaaaggtataaatgtctttaaattaataattttaatgtatcattcacagagataaggggattccaagacaagagaaacataaagtgtacctgacaatatcttactacatgttgcaagcaagaaggcatattgtgtgtattatgtatgtatgtgcatgtgtatgcgtttttgtttatgtatgtacatgtgtgtatatgtgcatgtgtgtgtatgcatagttggtataatttcactatgctgaggttatcatacaaaattcatgcactgattcctaaccacagtcctaagcctgtctccctaaggctactcacccatttgacatatcttagaaggtcgttttctgtctttgacagaagtctccgatttgacggtcaggatcccggagaagactctccagccacagggctgatcatggtggcttctctccagatgggtgaagtagagcattgcttttggactctgcttatatactggccagtgggagccatgggattctaggcttatgcctggttagcttgagtaaatgatgggactgagttctggtgaacaggtatagccttgggtgtagtgggatgctgactaagctattttcacatgtctaaacagtatttttttttaaactatgcttcttatacttcatatttgaatattccgttttttaagagggacggggagatagctctgtggttaataatgcctgttgccaagaccaatggcctggaattggtgtgtgtgtgtgtgtgtgtgtgtgtgtgtgcacttttatattatttatcacatataaatcatcatattgatataaacctaaatcaggtaaacacacagctttttctatacgtatcaatactttataaattaacttcatggaagtctttaaaattatagggacaagtaaacatggcacagaaaagagaacagtgtggcacattaaatccagcctaccttttctaaactttgtctgtgaggttaaaaaatgttcaacaaatctgatttttccctgtcctctagttaccaaagagaaagataatgagaagattactgtggtaagggaacgcacaagaggcagaatccacccccaccccagcggggcatgggggctctatcagctggcagggtgtgtttttctagaatgtctttgctggttgatttaaaccactaactccaagtttttaatatagcactttccgtgagtcactgggcagaaagcccatcccaaggcaggcaagagtccaagacagaaacaagcaggatccagctacaagctggatagcacagctaaacattcataattaagaaagctccagtcactctgagattgcctccttcttgataaaagaaggaaaacgttattgaaaaccagggtgagggaagggaacctccgagaaaatgctgaccagcagcaatgctaacaatcaacttggtgtccaggggaggagtggcaagctgcttagctcttcaaagggaactcagcatcctgcggactcagtgcagggcaggtgcacacaagtgcaggaggccgaccggtcccttctgagaaagcagaaggtgggggtgggatcacaggaggccccggtgaacaaattttttctgcgtggaaaatcactcagggagcaaaacatgtccaagccttaagaacaagctgtgctgacttccggatctggaccaaagcaatgcagatgctttctccttcccttataaactacaaagaactgttctggaagtcggtcaacagacagcgataagagcttgaaagccgagaggaaaagaggatgtgctggcaagaaacatcaggagttgagaaacagcgctatggtggatgtgttctctggcattccttcttctttcccattcaacctggcctggctcaagagaggtctgcagtgggaatcactaaaagactcagataagagcaccctcagagacatccttttctctctggctaaagtccatgcaaggagagcccaaataaagacccagtcatataggcttctgtccctttcttagaatccaaggtccctctagtctgatctgccagcagcagcagcagcagcagcaatgccaccaccacatctggttacagctgggacatcagcaggtgatctgtcacccacagcaaggaacagtgaagtcctgaatcttcctgactgcattctggcattataaagctaggcctcacagccattttccacacttcccactccatattttccaacagcagcaacatcactaaggaagtaataaatatattctaagaaaagtataatgaaatcaaacagaacttttgagaaacatcaagaaacatacagaaaggccagagaaaacagaacactagacacagaaagaacaaatccataaggaaatgtcagacttagcccaggtcaataattatcatgaaggcaaacagtttaaacatacctatttaaaatgcagagattggtagagtggttttaaaaagatgacccacctatatgctacttccaagagactcatgtcaaattcacagatgtaagtaactcacagcaaaagaatggcgggctgcattaaataaaagcatcctacaggaaagttactgtgggcaaagagggatgttttaaacaatgcagaactaatccatcaagaagtgataactgtcttgtgaagaaaacaccaaaggttcacaggtgtgaagcaaaaagtcgagtgaaagaagaaacacacactcgccaactatggttagagcatggtctccatccattggaactagagacaaagtcaacaagagcataggacccagcatcagccacggacaggtatctactcctaccctagcacattctgtctaacatccgcagaatacagagcctcaaaagacccatgcaatattcagcaaggtagagagcatcttaggtcataaaacagagttcggatttcccagcacatggtgacccacctgcaaccccagggcacaggaggaagagactagggcaagctggctagctagcctggctaatctgatgaatttggttcagtaagagatgctctcccagtaggtagagaagaggactagcagaaaacattcctgatgtcaacctctgacctccacgggtatccatgaataagtgtacacacacacacacacacacacacacacaagcacacacacacacacacacacgcacgcactcacacacatgcaagcacacacacacacgagcacgcactcacacacatgtgcgtgtgtacagaatatggaatcaaactagaattaaaccaggatgtcaagagagaaatctccacatacttcagaactaaacaacaaaagtccaggagtctcaggaaaagtttcaggtacacagaactaaatgagacacacggcaaccattaacatttgtgaggtgggactaagtaaggcaaagccgagagggaagtgtgtgggactaaacagatgccttagaaaagagaaagggtctgcatcccaagagaagtgtctgcttctagaatatagaaagagctgagcagaatacagtgagcagaagcgggaccagcacaatggtatctaactatcatgcaatgggctacggtttggatctcggctgtcctccaaaggtccatgtgttaaagactcagcctcagcctaagcttctatgaggcagcaggaattttaagagggttaagtgggggaaaagatgagttattgagtgaagagattcttacagggatcctgggacgctggcccctcctttttcttctcgtctgatttctagcatgaataaaagatgccacctctacttgtttccacagtgatgtactgtgccactatgaccatgggctgaaatttagactgccaggaccagaaatgaatttttttttctgataaatctcttaacacaaatgtttgttaaagtaacaaaaagtaaacaggtgctgtgtatctccaaaatcttgaagaaaggaatttgaatatgtttatgatgtatcacaaacatctaaaaagatgataaatatgtttaacttggtttaaacactacacagtgtatatcttgcatcatcccaatagttacatgtgtgtgtgtgtgtatatatataatgatttttaaaaatcagacttatttattttatatacacatatgtatatatttataagtgttttgcctacaggaatgcctgtgtatcacagacatacctcgtgcctgtagaggtcagaagatagtgtcttctgggactgatggtatctgaccccctgggactagaggtacagatattgtgagacaccatgtgggtgctagaaactgagccagacaagagctcccatggtttcagtccgttctcctgccttctagagatggagaattagtgagagaagactcccttggcacaggcatgccgtcctaaggtgggtacatgctagtatgaccaggtgcaagtgtagagggtggatgagggagccaagagccactcttggcctcctggtcactgcctccacaccagcaagctacctgggacatgaggttcccttttgcagggcccgggttagaatgttcataagaacagctgtttcctttaagcagcgatcggttagaatgaatcaaagggctacgtgtctgggtctaagaatagccccatcatttctgacagggacttagctgggatggaagtcattccttcaggtgcagaaaaggaaagtgtggcctgcgtcactgacttaaaataggtcggggcttgcaggtgacacatggttagtttctaggttggtatttcctatatttcctgtttgggatataggtttctgccttcttttctgaactggtgtgtgtgtgtgtgtgtgtgtgtgtgtgtgtgtgtgtgtgtgtgtgtgtgtttataatgtttgcatgcccagctttctctccactccatctgagatatttctttctctctctctctctctctcttccttccttccttcctttctttccctccctccctccctccctccctccttccctccctcctttcttcctttctttcttccttccttccttccttccttccttccttccttccttcctttctttctttctttctttctttctttcgttctttcttttgttctttcgttctttcaatcattctttctttcttctttcaagacaggatttctctgtatagccctggctgttctggaactcactcagtagaccaggctgacctcaagtcagaaatccctcttcctcttcatcaggagtgctgggattaaaggcgtgcgccaccactgtgttactacttctgtcaaggctttaccagctgtggtaggcactcatagaaattcagtcaactctgttttctccttagctctccccagtaggttcacaaggttttgacatactggtaacacaccagcagagcagtatagtagaaagaatgtgctatcctggggtggaattttccatggaaagggagcgtaaggtcctaagcagtcagaagttttatttctgttcacggcacagctttctttaagctttcgaatcaatacatttgaggtagacattttcgtatattcctttgcgacaagctggcaaggtggctcggcggtgtcagtgctctctgtgagaggctgctgacttgagtttgatcccacagaggagggtgagaacagtttcctgcgagtctgacctccacaggaggccatggtgtgcccatccccccacacccacactcttccacttagtaagaagtacgacataataaatgtaaatttaaatcaaaaatactttgtgggcctggagaaatgacttggcaattacaaacattcccccccatctggaagactagaacttggctcccatcagccacatcaggtggctcccagctgtctgtaactccaggtccctgacacccacttctgacctccctggatgcccatacacataggcctggtacacacacatcattaaaaataagtcttttaagagctactttgtggggctggtgagatggctcagtgggtaagagcactgactgctcttccaaaggttctgagttcaaatcccagcaaccacatagtggctcacaaccatctgtaatgagatctgacaccctcttctggtgtgtctgaagacagctacagtgtacttacatataataaataaataaatcttaaaaaaaaaaaagagctactttgtgaaggggcttctgttttagacaagctaatgtaggcctgtcttctttcctcctaaggaaagactaagggcaagaataaactcagaaaaatatgcaagaggcatcagcaagagaactctgagagttaaaaagaaggaaggcgaggtagctaggatcattgtaggactggaggtagagcggggagcagatacatcttaatcccccacacggaagacttgaccttagcctggcacttcccaaagccagccaacaaggattcagtccttccctgcacagagcgcccagcacctcccccttcttcactgacagacacatatgggaatcagacattaataagcagccttatttgttacactcttgctctctataagtctgagatgtccttttcttctggagtacagactaaaaagagatccctcaaattccaggcagcaccagagaggatctggggaagcttcagttatttgagggaaattatgaagctagaatgtcactgggctcataagagaaatcctttaagttagacctaaatagagcaaaagcctaattaagacataacataacataagaggcagggcatcctaatacagccaatgcacactgcataagacccagggaactcttgttaaggatttattttttacttttagttatgtacacattgtggatacttgggtgggtgtaggtgcctgtaggtacaggtgcctgaagaggccacaggtggtagatcccctgcagctgcggagtcagccccacatgagtgatggcaattgaactctgggagaataggacagtgctgagccatctccccagcccagaaccagggaaacaaatgagatgtgatgacgtgctgacaccgtgtgaagactagcctcgatgtcatctgaaggagacttcacagcagccgtcagaaaagcacctcagaacacaggctcggcagagcctcccaaagtgagtgaacagacaccagagaaggctcaaaaacgccttgacaggactctgctcacaagtagactgggtaagacaggagcatctgtgaaactggtgaaagaaaatgcagtctgaatgcggaggggcgtaaagcagagaaggctggctgctgctcttcgggaagacttggattttcaaattgctgtattaactactctgcggggggtgggtaatcagcttaaggagaggacaaacaggtcctcacgagtgacaaatgattgcaacacttaaaaatcaaatattcttaatagcatcaaaggtgcatagaaataaacctaatttaattgaaagctacagacgacagagttattattgagagaaattaaagcagtcaaataaatattcatgagttagcctttttttttatcaagtctatgttcaattcccttcaaacgaatctagagcaaggtctgtatattacagcgagattttagcttatttgtagaataaattggattctttatctgaaaacttaaggtgtcataaaggatgggatagatgatagtcttcataaacactgtggtgctgattggacaaatctctggcttcagacttgtgatctgcctcggccttctgagtgcttggattgtacgcagtaccatactcagtctttattctattccacaccaacacatagtcagctaaagggtaatattaatattaaagacaaaataattacatttgtgaaagacagtaattgcaagaccttggaatataataatgttctcaactgtaataagaaagttctaaagagaaggagatggtcaagacttgatttaaacagaatgtcaattgtcatagatagctgctaggagagagaaaaggcaagccacacacacacacatatgcacatgcacacgcacacacacatgcaccagacacatacatacaaacacatgtatacacatacatccatatgcacgcatgcacacacatacacacatgcaccacacacaatatgcacatatgtgagtgcacaaacacacacacacagagggacagagagggggcggggagagagagagaggtttccaattaaaattctgattaaatgtttttatgcagactgtatgcaaaacttccatatcatgagcagctcatcacagcaatagctaggaagacagttcagtatgtgaagtgtgtgttgcacaagtgtaaggatccgagctctgttcctgaaacccattctgagaaaaaacaaggtgatggtgatggatgcttgtgatggcagagttcaggaaataacgagaagtttccaggtggtcaacatatgaaaaacaacactcaaggtggacctgtagtctccacatctgcatgtacattcctgtacacacacacacacacacacacacacacacacacacacacacacacacagagagagagagagagagagagagagagagagagagagagagagagagggtgattttcaattagccaaagtaagggcagcaaaacgcgacataaaattccagcttgctcccaccactgtaaaaccccagagtcaccacaaaatgtacagagaaataagcctcacacacactagggaaaaaaatggtttaactgcagctgtcatccactggccagtgggagaagtttccactgtgggaaacctctggacaagggtcttccacagctgaccaagtgcatatatttgatgagccagaattctactccaagggacatacccaacagaaaggcactcaaacaaacacataaaatgtgatcatgcagctatattaatcaaagactaggaataacccaaatttccattaacaatgtaatatgatgacagtggatggaaagctgtgcgtagcattgaaattaaataagtgaacgagatacagaatcttatgcacgattcttatcaacaccattttcaagacaaccatgaaggtgccttgaattgccccattcatacaaagtttaagaacagagagctctccaatacagggagaagtggggacagtagttgttggaggtcacagagagctcttgggctttatgacaccctgtctcttgactctgtcaggtttgtcgcctcgggtgaggaggagtcttgcgtctccttcccttacttttctctgagtacaatttgacttcggcaaagagtttactggaaagaacacgctcaggtttgcaaggttgaacagtcactgtgaacaggaagcgcgtgttctgtctgtgtttcgtttgtctgtgtgtgtggagatggaggctgatcttggggtctttgtcgtgctagacaagttcagctcgcatcaactgctgagctgcaggaccagccctaaaattttattcttttaagtgttgagagaaagtctcaagttactcaggccagtcttaaactcgatctacagcccaggcaggacttagccctgtgatcctcctgccagccgctgggatttcggtcctgtgcctagtacaaagagtattttatgctgtgtttagaaacctcggaaggcaaacattcatttactctgagcagataagaagaaagattgacaggaaagtaaacggttctcgaatggcttgtgtggacagtctgttgagtaccttgctagcttccttcaggggatgtcttgactttccttaaggccaccctgcttacttggaggccaggccacctcatggagctaaggatgcagacagcattgggcctctcagagtggctggctactgcctccatccctacctaacactgacactgcaaaggtgggaatgctctctgtactgtcatcaccacctccctccccagcactgcctgtcagctgatgattttgaactagtgcaagaacaaatgtgcttcagccaccagccctgaaaatggaaagttgtctgttctttatgcttccacttgggcttggacagggcaaacaggggccagactggagcagagggcttattcgaggggctgtggaccagcaagtgtgtagataggattccaaactgatcttgactgtgaaaacttttgaaagggaaagtccttaccaggcagtgttttcccctgacactaattttgtttgtcttctggttgaagataatgaattaccattaggaataaattggggcctcagtgtcttctctgctggctaaggtgtggggttaccttgcatgggaggagacagcgagcctcttattttcccttcccgtatttcccctttgcttgttcatttctccattttgtcattcccgatgtcttcagcccttggcctttctgcccattcctctctctttacacagtcatgtttatttaattttggatgttctcttctggccaagagttggcttggtgcacaccaaatggaaataaatgtgattaactctgttctagactcagagggactgaaatataagaagatcgatgccagatgttgttgtgatgacaacctgttgggttgaaggaccccaggaagacacagtccagattcacagggacagagccactcacctattgtcacatgcagcacagaataatgcagaggcatggcatcataacaattcctgaatggtgcttctcagaagatggtacttcttggggtctggtacctggactagtgaggcttctcaggggatgggaccccaacccagaatgacaacatcacctgataacttcatcttcatcattatcatcatcatcatcattgttgttattccttttgttttgttttgagattgtaataaaattatatcatttctccattgccctccctccctccaaaccctgtgatttacctctccttgctctctcaaattcatagcccctttccccccacaaattgctgttatacatatatacgtacatacacatatttctaaacacacaaaaacaacctgctcagcctggataatgttacttgtatgtatgttttcagacctgtccatttggcatcggctgaccagtcggtgtgcctctccctggggaagggttgttcttcctgctctttgctttctgtagttgcctgtagttctttgtgtagggttgaggtcttgtgggccaagatccaaaacttcactagccctgagtagttagccaggtttcgagtactggacaaagtttttctcttgttggggaaattctttgaaacacactttctctgggaccttcccagaatcgccaaatcacgcagtcagagagcagggcccatggctctattttaacaagatctgcatgcttgtgttgcgtgtgcaaacatttatcctcagtgtctagtgcttagacactgtttactgtggttaagtggcatggactgatagcatgaggatggcctgagaataggtgaataattggtcacaccagagagggaggggggagggggagagagggggaaggggaaggggagggggagagggaaagggaggtggggggaggaagaggaggaggagaaaagggatccaatccggacccctcacctcttaaggccccacttgggttaaacagtagccaggcacacaggacacagaagacagaggggacagagaaatagaaaagtgccaacactttaccaactgagttgccttctccttagcctaagaaaatattttaaaacaaaacaaaacaacccagccactttctaagtatacaaaaaactcaatgagtaacagtaaacataggttaataagtagtattaatattttctatggagatatcaggtctttgagaggtagctcagcttccgggttcacccattcactcattcagtccagcatgaagctggcatgggacgtccagcctggaaataagtaagtcttggatgagccaaaggctggagcaagagaggactcgctcccatcccaacaatgaagggatgcagggcagagtggtggaagggcagagatgctcccaaagacagggtaaagggagcctcaccccacattctgcccttagtttgggctggaaatgtccctagaagaacagagaaaccgaggagggatcatgagctagtcctcagcccatcgcccgtgctttgagctctctcttgacacagcaagcaagactgattatagacaaatgtccgttcttgctttctgcatccagggcctgagagatctcagacgcccatgcttgctcaggaagctgtttctgacattggcctgtttggtgaccagaaactgatgctgtttctccacgtggcctacagctggccagttggcagtggtacggctgagcctcagaatactgacaatggctgttttcatcccatgagcagattggtgtcaaggctggaaagaaagaaagatttttcactcaactcccactcttcccaaacaagccaacaagaaggcgaggtgtttggaggcctcccacaccctatacgtgaccctttttgtatttgctcaaggtggtagtaccacagttagaacctttggagtttttttggtatccttttagtctgtgttaatgtgtctctgctgtacttaaattctcttcaaaatgacctccacatcgatacatttcttggaattcacatgtgagtaagaaaagataagataggctggcaagatggttcagtggttaagagcgcggactgctcttccgaaggtcctgagttcaaatcccagcaaccacatggtggctcacaactatctgtaatgagatctgatgccctcttctggagtgtctgaagacagctacagtgtacttacattaaataaataaataaatcttaaaaaaaaaaaaagaaaaagaaaaagaaaaaagaaaaggtaggatgattttattattatttttttttttttagttgtccagactgagtaattatttaagatatggctttaaaggctggggctgagtgggtaagagcacttgctcctagaacatgaggacccgggaccaaatccccagcatccagatagcaagctatgcgtgactgcacacgtactgtaaccccactgctatgtgggggtggaggtaggggaaggaggatatccatagtttaatggctgccagcttagctccaagtgcagagagagaccctgtctcaaaggaataaggtgaagagtgacagagccaggtacctagcatgctcctctggcctctccactcatgcatgtgcacatctgcatacataagtatgcacttgcatgcgcacacgcacacacacacacacacacacacacacacacacacacacacggcaggtaatcagttataattacatgaagccttgttggactattagagctcacagaaagcaatctctctctctctctcgaaggcagaaggagccctttgacctctagagacattccaaaaggctgaggtaccacgtccaaagaatgtgacctcaggtatgtttgtggaggaaattctgagaggaagtaaagtggcactctgtgggcacttgctggaaaacccacatctgccaactgagctgaaatcttactcagagctggaacaagactgtttctgactccctgcatcgcttccacccatgaaaagaaaactctgtttttcttgtttctctcgtcaggctgcctggagatgggagagagaaacttaatcagttgggcctgttctgttagaccagatgattcccctttagaaagatcccattttataaggtgcaggaggccagcacattatgatggttgtcgggagatcccagtcgaaggtggggagcagggaatgaggcttccacaaatccactgtgtgcaggggacccctcagtaggcagcaatgctccaagagactgggaaaagagcagtatgtctggatcgtggacccagaggctagggaaaccagaccgccttctcagtcagctgtatgcaatggtgttaagcacagcgctgctcaaccttcctagtgctgtgtcgccttaatacagtttctcacatggtgacccttaaccacaaaatatgtcctacttcatcactgttgtgagttgtaacgtaaatgtctgtgttttccagggatgacctctataaaaaggtcatttgacctctatgggggccgcaacccacaggttgagaaccatctgtcctacacattagggtagcactgaagcatcccagcgacagaaagaacagtgtctggctctcattgtccaacatgagaaatcacaacgttcctttggggaattctttttcctggcaataaatcctcagggggaaaaaatcctgtgacagaaccagccccagaggaatgtccataggtcagaaggaggccacctagcttggaaggttctggaaattctagttgggcattgggaggagtccaggcagctgcgctgatgcaagggggctccagagaggaaggagaacctcgggagttagtcagaggacgttgctcagaatgagggagagagtgggggaggctaccagtggaggccagggaccgatgtcacttcactatctgtaacttcctgttttggagaaagagcctgagcttgctttgggggaggggagcatgaaaggtgaagcctggaagattggtgcttgtgctctcactggagggcaagagggggtttaaatggtcagagcaggggcctggagagatggctcagcggttaagagcactgaatgctcttccgaaggtcctgagttcaaatcccagcaaccacatggtggctcacaaccatccgtaatgagatctcacgccctcttctggagtgtctgaagacagctacagtgtacttacatataataaataaataaatcttaaaaaaaaaaaaaaaaaatggtcagagcaggatggggtgacagacctgggcagactagaaggaaaaacaattggtgattctgattcattcacctcaattgtcacagaacagagcaaacacacatgtaataaaatcataaaagtctgtgggaagtagaagaaagaaacttcagcagatcaaagcagctgatgggtcagatactggggtcgggcctttgaaccccccaaggctacacgaggctcctacctggctgagatctatggctcttctgttctcggactattgacacaacagcctggctgctcagagaaatgggctctgaggatcctggcatccttgaggtagctccaatttcctagatgagcgtggggagagtggagggatctgggtctcctgagaagaatcgaaggtggaaactggagataaacacggggagagagcttgctgtctatggctcaattgctctgctgaactgcctcttggttgaactgctgcacagcctgaaggaaaccctattccacccaggcttccctccagagcaaaatatcagccctcctctgccagtggagtccactggatagccaggcctgctgtccccagagcctctgtcaaacccgtgatccttctctttccctgtgaccaacagtatagactcctggaactcagaaggactccacatggctagagtgttcccagtggaatcagtagtctgtcacagaaaaggcaaagatgactcaggaagcagacgtctgaagagatgcctggcctgactccatggaggttttagaaagacattcactctttccatagagtggagagcctcactggtgctatgcacattaaacatcagatgaactcgctccatctcaagggtattctgagtacccctcccccaaccctcaccaagggtcttccctgctttttggtaccctctcccaatcatatagaatttaaggcagattataaatttaactactctgctaagttgcgataagtaataaattcatttctttttgtgtgtgttttaaagctttgtagaaaacaacaatgtcaacaacactaacccaaacattgtaaggctgagacacaaagacattgagtttgaaggtaacctgggctacataatgaattgtatattccagaccagcctgggctacatggcaagccctgtctcaaaaataaacaaatagatgaaaatctatttttgcccaaaataactgtttacggtaacttccatgaaatgccccaggtctgggttttgctgttagtgtctccagctgggcacgatctttgatgtaatcagtgactcagcttactcgaaataaacctgttgtcaaagattcaaaatttatctctttgacacacacatgtcttgtgacccgcctgtccttctgctcaaagcactgtcccaatccctctgactcaacggggaaaccacaatctacaagaagccagagcgttcccacacctggggtgggctgcgcgtcaccagcagggcagcagatgtcattgtgcctgagcaggaagctcggcaggatggcttctttgccactcctctgtccacaggaaagcatggtgacgtggtggattcgtgatttggtggggagcacggtgaggtgtgacttgccatcctctctaaatagattgttcaacccagaagcagttgtttcttgggggaggcataacttgaggtaggtctggagatggcaatggctcttgagctcttggctagcacctgtgtcgtcctggggccactgctgacccaccaagaccctctacaacaggtgctgcatgtcatagctgaaggctgtcccactcacccaggtcccccaccagtcactcacaaccatgcaaaaagggaagtcttggccaaaactcactgtcggtttggtgcctgctctcagaatggcactgtctgagaataatgaggtgctctgtgtaaagaaaggggagagagtcagggctgcctccaaagccctgttctagactctgttgctgtggtggtttgagtgagaaagcccccccccccccgtgggctcacatatttgaatctttgatacccagttggtgtgccactggggatgggcctctctcttctctctctctctctctctctctctctctctctctctctctctgtgtgtgtgtgtgtgtgtgtgtgtgtccccgtccttgctgcctgcagactgcagatcaggatgtagcttccagttacctctccagcaccccatctgctgtgtgctgccatgctccctgccacaatgataagcaattcgtcctctgaagcagtaagcaagcccccagttaaaagctttcttctataagttgcctttgccatgataacagtaactaagacaggaacctcccatgccaagctcggcaggtcagggcacatttgcccttgggggcttttcactggaatttaatctttagggacctttgcagattctgaacatctcatctgttcaggagctccactatctttcctggtctctaagccttgttccctgtcctgtctgcctcaccccacccccgaccacctctacctgcagttactgtcccaggaatcctttttgggtagttactgaggtcatggcctctgattatataatgaatgcaaccatcgttcatgtcctagtgaaactttgaagatagaaacaaaatgtaaattcccacttttagggcaggagagtctggaagctcgggcaggagcctctggctacgtcagcctctggccggtgtctctaccatgactccccacatgctcatggaacgtgccagcaataacgtaagatgagccctcggatgagccccacatttgggaggaacttctggagcatgacctacttttttgaatatctaatgaaattcatagatttcccccataagatgcatatactcaatacttctaaaaatctagcattttcgcacatgtcagagatccattcatgagaattcaatcttgctttgggatccttttgcttttcatcagggtcatgggttcccagcatctcttgccatgaagatgtggtcaatattctgatttttaagagggcctgtcgaacttaagaggggctgtggttctctcacaaggacatctgctaagtagctgagcagtgcatttccttgctggtcaaaagtctgagggaggaacaatgggcgcagcattgcatagcatgacaaagctcttcatctgggaagctggtagtggagtgggcacgcatggaatgtcagccatcagaagtgcaccctggattttgtttacataaagagaaactgaggaggtgctgtggaaatgaagagagacagcaccttccatttgcttccacattaacctgtaggtaagtaaagaaaacatatggccctcattacaccaagaagttatataggtcagaaacacaaacaagattaagagagagctgggacaaatggaaaaggtcctaaatagaaagacagtctttggtcacagacaggatacggttggggacatcgtgggagtcactttaagaaggtacgaggtatttgggctcatcataatgagaattccatcattttcaggagactccagccagggctgatgaaagagtgaatgctttggaaggtggtgataaaggtctccgtatcggaggagaaacttggcttctccagtgagctaggaaagcaggaagcatcattcctatctcatggtctgtctagagtgactgttggatctgctggccctctgatgtcacacccagatgagggctccaagccaagggttaggtctcatacctcttactcacccatactctcatacctcccacagccaagagaaaatgttccctttctctagccttccacagcagagaatatgcacctgagattattctacacccccaaaattaggagggaagaagtattccttctaaggaaatggggtctgggaaggcccaggagagagtgtaaggcaaacctgtgcccagggcatggctgtaacatcaaccttcatgtaaatccatgcacccagactcctcatgctgagcatgatcaaggcccataaaggttaggtaaaggtgccctaccctgggcacatgtgtgtatctggagagcaggtacttcagagccaggtcatccaggttgttgtgtagtatttttctccaaattaaaacagtccctcctggagggaaaaaggaggctcataagactcaggagacccaagaaacttggaaaaggcaactccattgtgaataattgttagggaagggagactctaaagtggaactacctatgagttgtgcagggatctcgggatataccttttgtgagtgtccttcccccatgctggggtggactttccaatgacatagctgcttttgagtcacccactcttcaataagtaatagcaatcaatttattagctcacaaagcattacatgggtgatgttttctcttttatctgtgccgagtcctgggtggctgtgcaggggacagtgtgacaaggtttcctgtccatacagcagaatcagcaggacatgggccttcacgagtgttgtcggttgctgtaggaatagggcttgtttgtataataatgtacataatttactttatgttcctcctttgggagatgttctccccgacaaggttatcaggcaacgaatgttctccctgccaaggttaatgtcccatgataattagaaacaacatgagtttaggagttgaagatgtgtctatgttcctcagcaaaaatggcaaatgctgtgagcttcagtacagcccttaaggctgtggaaaagaactctgaaaacatgagttcaaaaattataaatttctcaactaagcagatataaggatgcaatatgaattgtatgaagggcttcacagatctaaaagaacaaaggcatgcactaatgaaagcttgtcagaaagatacaaaggcaggcagattcctgagttcaaggtcagcctgggacagagcaagttaggcacaggcatggtgggaatgttaatttcaggaagggattccacccagctagcttactgtctgtgcttacaaaggcaggcagatctctgaatttagttgctgtgttaaaaaatgtactagctgtcttttctaagaatcaagggacttaggtcataaaatgctgattcatgggataatcaaaagaaaagctggggtggatggttgaattgctgtgtaaacaaaagactgggctttggtgttcaagatgaggtatctggagaactaggagcagaacacacagggctctcagcttgtacccagccagcctcccatgggccaagcattgacacacatgggcctatgggagccatatctattcaaactactaagattggtcttcagtttagtgtagcctggactctttttgtctcccacaggatgtgacagttcgattcctatattttttgtttgtttatttttgtttggtttggtttggtttttttgtttttctgagacagggtttctctgtgtagctctgactgtcctggaactctctctgtagattaggctggcctcgaactcagaaatccacctgcctctgcctcccaagtgctgggattaaaggcttgtgccaccacctcctggcttgattcctatattcttatgaccttaagctcttcccacttatgctaaagaggaggctgttgaagcatgatggtcatggaggtcacgctggcctaagcaaattcacccacggaatccctgggcaggcagactgtgaactctggttatctcctttctcatgcaactgtgacataaaatgactctccagaagaatgaagagcacagcttcttcctagtctctgaaatatacacactttgattggttcagagctgggggaggggaggccagtaggacctggcattcagacagggtacagagggggttgccagaggagtcatgccagactctaatcaggagagggaaggaaaaggtctcctcaccatggagatgccccaacccctaggtccatggttctcaacctgaagatcacaaaccctttggggggggcgggccatcaaatgaccctttcacaggagccacctaagaccattagaaaacacacagcattagcaatattgaaaaccactctcttagatggtcctgccacctaaacacaagcttctgtaggcaggtgcatgtccctgcctggacaactttggtctctcttgcctccagtgctcttgatgtctctccaggaccctaagactttagggcaatggtttcagtactgtgtctctgtttggccctgccttcatctgagccagtgtaaaacagtcttactatagtgtccagcctgtcctggtcctgtgttgtctgttttgcactgataactctttttccctgacatctgagaggcagtttagtgtcagaggatttgcctagcatgagtgatacctctggttccattccccacaccacaaaaaaaaaaaaaaaaaaaaaaaaaaaatcaaagataaggtatttgaaatcatgcagccgtggagactgctccgggtgacattgtacaagagatcaccaaccaacataactgatatctatggatgttgcaccagtttgcactctggccttctcaactcagcacctaataaaagagctggattccaacaaggtggatggatctgcagctatgagttctgatatatcctgtgcatgggtccctgctaaacacttaccatcctggtgcaacatacaaggaagccaaggctccgcaaggggagctggctggcccagttgaaaggcagggtttggggagatgaatctgaaagaaccatactccacagctcatgtatatactagagaccatgcctccttctcccatcccactgtctctctcagaaggactttccaagtgcttcttaatcaatattattagggttcagccagcaccccctccccttgtcttcatggcatcttagtcatcttcttttagtctcaaagctccctgcactgcaacctagtgagctattggcattagattagaggcagggcaatcctgatcctcgaaagaggattagagttggtttacctgggtttcaattgttagattggcagggaaagtaagcagttgcttatttactctgggttttggttttgttttgttttgtgtttctacccagcagtcttttggttgggaaggtgagaaggaataatattgaggtagttaaaggggaaacccagtgctgtctgacaggaccaaggtgtttgtgagggatgggtgtcatttctgatctggtcgatgattgcacactgagcactgctgttcattcttatctctctgtgactaacatgggggaaatttttgggtggtctttggggacttagggtgttctctaaaacctggatttagcccatgattcatttctgctgtattcactaaactcagaacagactgcttaccatccaaagacacctccccctccatttccagtaaaaatcgcctttcctgtgtcctaggccttcactttgtacttcatatcccgctgacagccttgttagcatcggtgtgtgctcaccttgttctcctgagcagggtccatttcaaagcttacaaagccagaaggccagttttaggaattaaagaaagccctgggagttctacagctacagctaaataataaggaaaataaacatcaaccagacagtatcagaattgagcttgactgatcatggcatcataacctcgattgcagcactgggggggatgggggagggggtggacatggtgttgtgagctaggtcccagctgcggcccctgcttttcctagtcagagatttctctagttggggatctcgagcaggaacctgtcatgagtgtggctgaagggacccccaactcagagaacccaagtgctcaaggacggtccccatgattcctgagtgctaccaagaaagcccagttctgcagcagggagattattgagtttttgcccttgcaagggactggtgatagcaggactctctgtttggtaaagacagaggggtagttggcaggattctgaagagccaccctctgacccacagggagaggtggaggtattcatttagcagaggtgttgaatccaaacacttatgaaggaatgcccatgtggctctgttaaagcccaaacctctgactgcagtcatgcaaaccaaggctgtccctaaggggtctccatagagcttcgccggctgtcactctgactactgttgtagtgccatgctgctgtctggctccccagagcatgcccagaaacccctctagccctcgttctgaggtgtcgcagggacctgaagtggaagctggtccagtgcagggggatcgttcctaatgcattcctttttgttcttcaccgacttctaatgtctcaggctgtccccagggtaaaagcactgatgtaactcactgatgagaggaggcctgacgcctcgctcattttgaaatactgacattggcggggaaaattactcaagctctcttgtccctttccgggcctaattaagtggctccgcaggtgactcaacgcttttatttttcagaatgacatcagacttattttccattttaatagcttggttacttcatcgatttttttttaaggaaaaaaaaatccaattccactttctagtctgtccatgccccctgtcctcccaccctcaagccccctgccccaccccctacttcccacccccacctccccatctgatttttcttccactctaggaaatgctaactctcactgagcctggaggttgcttctgcattttcttctattctgtgccccaggaagaagaatccgggaaaggagctggcgtgctccctttgtttgctaagtacctaaatcatttcaccaagcgttggagttgccactatttaccatctggtgcgatttcctctgtgccacaatggccaccagaggagagctttcctggaggcagtgtctgggtccctgcaaaaggctcacacttctggatcttcctttctgcactgtggctgcccctgaccagttcaaggagagaggttcaacttcacaagcttgttcagagctccttaagtatttacaaggtggtggtggaccctgctaacctggaggtcagctgtccctggcatttcataaatcctgtagtttggaggaagatgtgagaattagtcatcttagcttatcatagtttgggtcctgccttaggataaagcaggtgagcaagtttcacatgacaggttgtttaatcggtgttgtggggagcaagtcagcacacttggtagatttcccttggtggatttcatttcctaaaggactttcttccactcagcctcattctgtgacttaatttcgttcccaacaaagccttatcagtgagggtaaggacagtgcaccatctctaggctgagctggcaatgaagacccagctagaccctgctcctcacctactgttggcctcagagggacttggcacagcaggctgacatagctcacggaggtccaggcttcctcgggacacaaaggtgagtggagcagagataagcgctccttcttctcctagccacaactgacatcattgagctcgcaagtaatgcacattgcaagcactcagagtcactttgtcacaccaggagaggccaaagacactgtgcacacagtagggactcatgaaacgttccctttcttccttcttagggaatttctattctgtactgagtatttctccgataagaagggtattagccttcttagggttttgctgttgttgctttatttgagaatacttgtgaatatggaagatatttcacgggggatggaggcaaagataaagtgaagggcgtgggggaggggacctgtgtgagaatggagcactggatggagaaggagaggaagatgggaggttttaggtagggcccgggcctcctctctgtgaagggctgtgtttgccaggacggctcagggataagctcaaacccaagcttggtggccacacaggaagaatctggtgacttagagtacagcaggggctgtggaacacggcaccccttgcccactcctggcgatgtcgcctttcagcttctgtcccggagacctaaggtcaagggaccacctagtcatgatcctgcttaaagagttatgtgcagtacaaattgtctcatgaaaagaaggagtgagcttgtggtgtgtgtgtgtgaatgtgtatgagtatgtgtgtatgtgtagtgtgtgatacgtgtgtgtgtgtgtgtgtgtgtgtgtgtggtgtttgaatgtgagtgggtgtgaatatgtgtggtgtgtgtgtgactatgtatgaatatgtgtatatgtgtggtgtgtgtgtgtgagtatgtgtgtgtgtgtgagtatgtgtgtgtgtgtgtgtgtgtgtgtaagtgagcatatgtgtacatgagaaagattgtttgagccttccaagtcttaacacaatgcagatttgtttcaaatgagatgggagtttggactgagtctcctcaggaaatagaaagcgggacacgcttagttgagcttgtgtggcagcacactcctttatcctagtgttcaggggacagaagcagtcaggttctctgtgagttctgggccagcctggtctacacagagtgttccagggcagcctggtctacacagagtgttccagggcagccaaaaattatgatatgccacaatctaccccataacatgttcaaatgttacgtgttaatcaaaataaacttaagaagtttttgaagtagaggagccaagcttcctgatatcttcttcatgtgttttacttgtgtatcgaattaccacacaacgctccgttaaagtcatagcaacagaaatgggagaagacatgctaatcctaagaataaagtagttatttctaaaccatccagtgtgacgggaagttgtatcaggcaccagattgtgctggcaaagacagagggacatgagctgggtgcctgtgccagtgtggacagtaatccctcggggagatgaggagcccgggaaaggctcccagcaagagccgatgaatgatgaataccaagtagtgggagaaggtggggccctggtgccaatcaagtgtttagcccacgctgccacgcgatacgtggccttccacagcctagcgccacattgtttcctctattggattagctccatggatgtaaattcattcttctccattggggaccacagcagacctcgagacatgccacagaagcgtttgtgtccacacacttcgtgggaccacgggtggaggatggtgcctgcccgtgggttttcagtgactgtttgtaggagaaattggtctcattatttccagttctgttcagagcaactcagcttctgccccaccatgaggatcccagtctaccgtgtcttccctcatgggcactgtggagagactattataaatacctcatcagagaatctgcatgtgtagaggggccaactccctcaagcatattggtcctcaacactgtactctgcggtggtgggccttgggatatctgtgtgtggatccccctggtccctaccttcctggcttgagagatgaggctgggtgactagccagtgtgggagggagatggagatggcaggcttctcagggcgctggacttagtaggtcccctggggcctcagagtctgaagccctctgcaggagtctatgttctggcaagctgggctgcctcttggcgccattcccagatgtggagtaatgaggtcatcagcgggaggctggggccagcctctgatgggctgtgtcattgtagcttttcctggggctctggctgagggggccatattgcccttccctctcacagctggacttgtgtttgctgctcgctcaaaacaagcctgtcgtgttcaaaaatcctgaatacgaagtaaacttataaagacacatgaaagggggggaagggcggtgatgagggaaggagggaggaaagaagacaacgtgtgagtatggttgtagatgaacaaggcaccattctcatgaatgaagacgttacatctctctagctaccaggacatgcaagggtctgtcctgctgtggtttattcacctgcttacgtatcttttgtacagccttccgtatcacgttgttctctgagcgtgtgagtagctctcctttgtcctcccactaggccttgaaccacctgtctggagatgctttgctatctctagaatagaagggcacataaagggggaaagcaaggccaagctggtgctgccaaggaagctacagatgtgcacggtagaatggcctaacggagagggagggagggggatgggagagggagggggagggagagggactcacattcctgaattaagccccggtttttagattggttattgtaataagcaccaggcagatacgattgtataaggcctgttctctgggagagcccttgcccaaactcctactgcttgtccttccgtccattcctcaagtcctatcgcctggggccactgtcaccaggcagctttccccagcctccgccctccctacctgttgagttgaagacagggatggctgcttggctgagaatctagactctagctccatcaggcattctcactgagcagctgctgctgctggggttgggtttctttaagaggccacctgtgccctttgacacagaccattcaatcctctagatgcaggagcccaggggatggcccacttcaaagcctgagcttggccatcatagtcctgaactgcttcttggctctatccttccaaatagaataaatgcatcctctcccactcccctctctctccctctccctctcccctccccctccctccctctccgttaggccatcctactgtgcacatctgtagcttccttggcagcaccagcttggccttgctttccccctatatgtgcccttctattctagagataggaaagcgcatccagacaggtggctcaaggcctattccccagccagaaggtagctaggctgcaagcactcaagtcagtggacagaggagaggccttggtgactagaattgttattgaaaccatgtacccaatggctggcactttctgcagactgtaacacataggacatttaactctgttgaagtattgtcaactggccctggagggtctgagaggtatcctagctttgctcttatacatagaccactacattgaaaggtgtctctgaacacagatgagcatataggcatgtgtgtactcacgtgcgtgcattaagccccggttttcagattggttattgtaataagcaccaggcagatatgattgtataaggcctgttctctagcaatgacccagcctagcaaaatatggaagggatccagggagactcttgcaaggacagagggcttgagggagggcagccagactcatgggaacccagtggtgggatggacaataaaactcgtcccaaactcattaagggaaaagggttgcaccagatcaagattcaagggtgagcataaaacagggggagggtcttgtgatggtcagagccctgcgaaagagactgaagacccaacccaagcagacaacagctggctccgcctctaggacctattcctatagagcagaatgcagctgataaagctgaggtggttaggttttacgttcaactagactggctgttagacatttggagaacactgtactgaagagactattctagataaagcacatttccccttccccaagtggatgggtgggctacaccctgacagcctggcaaaagaaggcaggccaggatccacagggggttcctcctgtaaacgaccttctagctaggatgctgcccttttcctgccttcagactcgaactgagacagcacaggctctgcttggctctggaccttctggcctgccctggagcttctatctgcagctctcctgggactccaaaggctctgggctctgtcctggggccctgtcaacctccagtgtcacagaagccaaatccttatctctctctctaaatctaaatctctctctctctctctctctctctctctctctctctctctctctctctctctctctgtcaaacacatacacacacacacacacacacacacacacacacacacacggtcctcggtttgtgatgggattacatcctgcaagccaaaagaaaagtgaagaaaacaaacaaaaacaaaaacaagcacaaaagcaagcctgcattaacctcaccaggaaaccagctcaggatgttccccggctgccttcccacccatgccggcagctgccactccatccgtcctcccacttcacctccccgtgtctcaaagaggaaaggttcctcaccccaactccctattgtcttttctggataaaagtttatttctttgcactaaatgcttttaaagcattttattccactgtggtaaaaagcatcaaatataagctctatcctcacccacgtaggcagtgttgtgctgagatctccagagctcagccactccttgaacttgtaaggaaacacaatgcctcttcattagcacctctaggtgccactccagcgtccctggcaaccatttttctactgtccaagagtcgacgtcatactctttatctaagctgtaccatgtggtatccgtcctgagactgattttcctcagctctgactcctctgggcctatccaagttggctgtggtagaatcctcctcctttacattgctgggcaatactcttgtatgctctcaccctattgtcccttgcccaggtctgtggacgatgatgctgctttcacgtcaaccactgtcaacagcacagagatgaacagtataacatgggtcccatggtatttgtgcttaatttcttctaagtttcctttctggtgccacgaatgccaactgaggcagcaagtggaggcagagggctctctgtcaggccaggaagagttaccagagtttctggagaccaaagatggcagcgtggaccagggttgggtaggaggagatgggtgtggtggggcacattttacagtagacatctcaagtgccatcttgccttaggatcttcctctatctgttccctctcaaaggacaagtgtgatctttctcccaccagctgatggtcacctcagggaataccttagtgataaccagcagtcttcggatatgtgttcaccatatctgattcattctggctctccttacactcagagaactgaactcacgaggtcacagaactctactgtccacaggcagcctgaagctcattggcccatgtgtcagggactcttgatcatcctaaagagtgttttttatgctctggttttaaatgcactggcacggggctggaaagatagctcagcagttaagaacactagctgctcttccagggaacccaggttcaattccccacaactacatagcccctcacaagacccagtgcacttaaagattaatttattcttatgaatagtggtacttaacctgcatgaatgtctgtatgagcatgtcagatcctctggtctgagcactttgccttatccaaataatccattcccccttccccagagcctggaagtcactgttctactatgaggtcttgtgatttggagttctggagactccacccaggatgcctgtcctaaaactgtcctggtgtccttcccctccccatcacctccttctccccctcctctccacaccattccttttctaggttgccagggtgagtatgaccttgtacagtttggggcttgagtctccatcttttccctaggagtcttgagagaaatgactctgccccaatctcccaaggccacaccaatgtcaatgttgtaaaatactcagtgagaaaaggtgggcctcgatgacagacactgggggcagggtatctttatttcatataaggctaggccaagggagactcatacccctagttgcatgggcatcctttaagttgccttctagaacattcccccccattcatgtccaccatttccaccattcttgttggaccatgtgcctccctttccccacaatacactggaaattttctcttgacagatgcttgctctattggattctacatcctacggcaagaaggagactagatactgggtatattggggaggaggaaaaagaggagggcaggggagaaaagaacagaccaagagcatcctttaagagaaattgactgtgtgaccaacatagctgtaagtgtgcattctggatatatgtactaataatctcatttacatttagagcatgctaaaatctcatttacattttagacctgtaagttcagttgtgtgcattgtatttatattatgtaagtttatatagccatgcaagtgtatacagttttatataaatgtattcataaatagaattaacctcccatagctacagattctttatcagtaaggtgaaccaacaatgaattttaaaatatctattcatttataaaatatttttagctatatgtatacttgtgcatctgtgtgttgacatgtgcacatgatcacagaatgcctgactgtctggggatggccagaggcgttgtactggacaccaggtacctctcccgaacatgtgtgttcttaggccctaaggctggctcagacctcagctactctgcacatgtgaggggaacctgtcttgtgcttttggatctcagtgccacctttgtaaaaattgtgtctaagctggctggtgggagggcaggagacgctgcatcaatggcaggctctgagcaggcagccggtgctcccatacagttgtcctcttgagacagacatgaaattggagtctaaaacctggttcttatgctactaattcaacagagcttacatcctgatttcagtggagagaggcaggccagttctagcttatgtcattagggtggggacaagtcaaggcttctgacctgagtccgagagaggggtcccaccccacctacctttgggggcacttaagattcatagtaactctttctaagagaaaagacatctgtgctaagaatagctgtgcctgcctgcacacggagccgagccgggggctcagacctccttcagctgaaagacatcttgctaaggtgaaacacttgctgataaccttgactctagttaggaccttagccaaagaagaggttagctgttgtgttggggctcagctggctcttccatccccactctgtcatcatagccatgatgatggccttcaccagggctggtgctcggccttcttgtccctttcagggactcccagctccagctgcctgcagcatgtggcttgacggagtagtctttattaaatgctttttttttaaaacttttatcttaaacctgataaacctagccatgagcatcattacctgctaaggtacaaagtgcagcctggaagactatccacacccccacgatcatgagtacagtccacgacaaagaaagaaatgaagtcttctttagaggaaaagcccagagaggcgaagtctgtggtgcacaccccattattaagtcgatggttcaatcacagcctgtattattttattctcaaattctgatgggaggctatcggtggtctcaaaaatgccacagaccacccaagaggataagagcaccttaggaccgtgacatggagaaagcctgcctagctaaaaagggaacagtggttctgagacagaaacaaaacaaaacaaaacaaaacataacataacaacctaaaccttttccacttttccccaaactgacaaatttgacttgtcagatgcaagttcaacttgtggacaatccactagcgactgatagtcaccatggtaactgctggtcacgtgccggcacagaagccatcaagacaagagagccgatttccagactgcttttcttctagtaaattctgcgatgtcagcctaattaacaggagcagaatcgggaccttagttcaagtaattggcaggcattcttaaagcagaacaaagataatttagcacctcttttcctcgtccctgggtgtgcgccaggcctgggagggaggctcgctaggcgcgtctccctcaccttctccctgtgtttgccaagctctgaggaggctgactttgtggagtcctgtctggagagagacccgaattcttcccttcaagtttttttttttttttttttttttttaatatcagaaactaacgtgagagggagccaggaacaaattcagaactaccctaattgctcgttttaataagtatcagagttccattcctttgatttctaatagcgtctccaggcaaaatataggtataatgggttttaagcttctgtgtgtgacactgctttgattttatagtagaaaggagggtgtcccagactcaaagcacatctcttagctgagtttaaggttggcccggggacgaaggagagctgaatctgaattatcgccgcaaatcacagatttggcccatggtggggacctagcctgctacaaacgtctgtgtctctctggcaagagggtggattggcaacttggtgcccagctggcctctgccacccactgatggcttttggctctgccctcttcttctgctgggcatcagcctgtagaaaatctgtgcccaggcattcaggtggctcagctgcttcttgtccaagtttccagaactttcttttgtctatcaccagacaatagtcccattgtcccccaggctaatgaagtttttttttttttttaagtcaaaacataatgatttcagacatgccttgggccttttacctttcttctgaggcagagtgaggctgagccatcacttaggagtcatgttcttctccaatactgttctggagcgctcatgcatggagtaaaggcgacttttaatcaaccacactggccattgttgtctgcccagggctcccagtcaccttgtctgtgagtgtatgagaactgtgaaagtaaacaaaagacaaagaccaaaaacaaaaaacaaaaaaaaaaaaaaaaagaaagaaagaaaagaaaagtgaaggatattcacttgaagtttgctacagcagaaaggcaattggctgctgttccttgggtttggcaggactcagagacaggaaaacgtgtatcaggaaagctgttggtgggaaacacacacagcccagggcttccctgactgggagctgttggcagggatagctggggccagctaacaggaagcaaggatcctgtgcaactggtaaggggcacatttcttctgctgttcccaagttggaagtggccataaaaactaggtacactgttagctatttatcaagtcctagcattttggggccagcgttttcaggcttcctgaacccatgactgcagcctgtgtggcttcagaggctgacttctccccgaacctccaccaaatgaatgaagggttgaaccgttagatataggaggtgttatggtttgactaggaatgctccccctccacccctgccagctttattcagagcttgactgacagctgatgagcttcctgggggatttggtacaatcagtgggcttacccattcgtggattcaccataggatggcattgttgcttcctgtcatgccttccgggtgtcacactctgcctcactgtgggcccagagtcaccagagcagaggacaatggactgaaaccatgagccagaatcaaccttccctccctttaattgtttatattgggtactccccatagtgaagaatctaacaaatagggaattgcatatgcctttgagagagataggttcctgggactcttgatcaattgctcccttggctcaactgaagtcacttccttgaggctccaccacctttcctggggattgttgggaatttgggaccactggcatgttggagaccgatgttgggtatgatgaagatgattggagagagtggattgggatgaattgttgaagatgaagtcacccacctccatcgtctccttccttcctcctctgcaccaccctaggaagctatgtcttcactgtctacccaatgcttttctgcagtgtttcaccttcgtaccgcttcttgccaacccatgcgatgttgagaggaagtctgtgtttgtttagctttcatcaggaaaaaaaaaaaaaaacaacccacagtgagtactaagtcccttgctaggatgtactaactaacttacagctggaggtggttatgaaatgctaggtcctgtggtagccaactccacccacaggctgggcagggtggtatgggagcacagagccttgccagagcacctgacatcagcaatattctgtttgcagcaaaattattctagacatttccagaaatcacaggctagaagcttagggaagccacactcaacccggagctgtcttttgttacatacaggtgtgtgtgcatgctcaagcatgtgcatgcgtgagtggttatatttggacatgtgtgcttgtgtatattaggccagaggacaacctcagatgttatcatcagaatgttgtccaccttctttgagatagctcttcttggcctggagcttaccaattagtctagacaggctggccagcccatcccggggatcccctctctctctctctctctctctctctctctctctctcctttccctgtgcagggttggcaggcgtgtgctaccatgcccagcctttgtgggttctggagattgaactcaggtcctcatgctttcaaagtaagcaagctctctacccacgcagccatcctcccagcccccataaatacagggttagaattttaggttcttaataaagtgtaagggacataacagctgtctggggtcacctccatgacatcatccatcttatccatggttcagccctcaaaacctattctcctcccattggccctgtctccatcacactgggggttagattctgtgtgtgctggggggaggggaatctaggaggacaaacacaacaggcactacgttcaaactgcagcagcaccactgatttttcttttgaacatttttttgaggtgggctgagtgaagacatgtttcaggagttggttctctccttccaccttgtaggttcccaggatcaaacacaggttgttgttagttttgcagcaagcaccttcgctgactgagccatggtaacggccccgtagttctttcacagggttcagctccctccccagtcatggtgttgtggtacaacgttgcatctcattttggacaagggttgttctgggaaacagatcaacacacccttacgtcatgtcactgtttgctgacagtggactcctagttacaacccacgtccttcctttacaccctgtaaaggaaggacatcttccttttacatcttctctgcagcaggacacactctggagactgaagtctggactcctggagcatgatgggaaaacatggtcaagtgtaagccctgacaacaacctccagacagctcccccaagggtctccatatagccatgaggacccaggaagtgacagctgatggttcatgtttctctgatgatcagtgcttagataccccactgccctcccacccactgccacccctgcatcctctgtaaggaacctctgctgaggaggctatgctcaagccattttcacttcagttttatagcaacactctttttcaagtttaagggggctctgatcctgcaatgttttccaagacccattttggcctgtgcagatgtgtcaccaatgcctgatgtttcaactgaagagcttgagtttcttttctttgttacatatcttcattatttccttaattatttaagattatcatataattacatcatttttccctcctctttcctccctctaaaccctcccatatacccttctgtggtcattttcactttttattaattttttttcccacacaataggttttgatcgtgtttccctcccccaactcctccaaacctacttctgctaaaagaacatagtaataaaatgactcctagtagccaggcagtggtggcgcatgcctttaatcccagcatgtgggaggcagaggcaggtgtgatttctgagttctgggccagcctggtctacagagtgaattccagaatagccagggctacacagagaaaccctgtctcaaaaaaaaacaaaaaaaaaaacaaaacaaaaaaaaaaaaaaaaccaaaaagccaaaaaaacaaaaaagactcctagtgacctagtgacctagtgacacactgctatacccatagatcggtcctcactcagcctcagcagggacgcttcttactgtagtacataggaattaccaaagagacccacaagcgggaaagatgcagagagggagagactttggagcactcaattcgaagtcagatgtcttcatcaaatccctctcctcaagacaaggatttatggagaagaaaaggtcaagagactctaagagctggaggtggtgactgagtccaaggggtcaggtcttcacatagacaatggaagtgagagagtctcagggttcacagggactgtggtggcgtgcacgagacttgaacaggttcaggtggacggggtctcggcactgggagagtgaagtggacaaggcttttgttttgccagttttattttgctttaatcttgatcttgccccttgtttaatgatgtgccatatagtatgcttttgcaggtcggggcagtggacacgggtagcgaggggaaaccgttgaagctataccacattcaggtcgggttgtttcgccaggagcttccctaggttagagatattaaatggcattgtttactaataatatttgtaccttaaaatcgctttatctcatctcatagtgggttgaggatcacttgcatttgtgtgagacagatgccatcaggccaggtacctgtgccctggctgccctttcgctggtgccaggctctgagctaagcctgagcaggattcagctagaagcctctgtgcgggtatttaaagagaacagaaactgcaggactgtggataagaaagccaagattcaaaccaagcaggccaggctttgtaccacaagcagcatggctgccacttcgacaattgtaacacagtccacatatgaaagaccacctgtcactttcattactggatccttccgataaagtgggtgtaccagtaactcaactccctaaggaaatagacgtggcagccactaagtgggaaccattctgggtctgtgtagagatacacagccacagcgtgtctgctcagtgacagtaatgtagtacaaagttcatttgtgcgtggcctctgagctgcatactcaagtctctttcctactaagggctattaaggagctgcaaggtatggtaggaaacctagaggtagggagagctatcagcagaagagagagaggacagagacaaagagataggagagagggaaaaaggaggaaggatggagaagaaaagagggaaaagggagagaaggaagaaaggaaaagagggagagagggagggagggagggagggagggaggaaggaaggaaggaaggaaggaaggaaggaaggaaggaaggaaggaaggaagggaggaagggaggaagggaagaaggaaggaaggaaggaaggaaggaaggaaggaaggaaggaaggaaggaaggaaggaaggaaaaaagaagtaaagagcgtatccaagaaaatcggcacaaaaagaatctctgctgggcaggctttaacttccaaggccaggtgggtggtgctcatttgcataacgatgagctccaggcaaaagggtgttaactgccttgtaaatgactctggctcccaaaggcagcacttcccctttgctccggagcactccgactaaggacaggaaatgtgtacaatatcagaatgcaatcacaggaaatgctcgcacagaaagcttcatttattaaggtgtcccttgatgtttgcttacctggaagctggccttggggaaacgccttgtttgcttgcttttctggctagataaacttgaacttatgcaaaagggacaaagttgttttaataccgtatttacaattcctagggctcttccatcacccacatttttaaaagataatatctcactatgtaggccaggctgacctcaaactcaccatcctcctgtctcagcctcttgagtgctatgattacaggtaccacacacataaggcttgtagtaaatatcttttaaagatgtatttattttgtgcacaggtgtcttgcctacatgagtggaagtgtactatgtatatacctgatgcccatggaggccagaaggggggatcaaagatggctggttgttgccatgtggtgtgcccggaactaaacccagatcccctgcttctaagaacaatgcgtatttttagccatggagtcatctctccagccctaggcaatatgtttagttcaagaaattttactccctgcagtcagcatagcttttgagacaccattgttaacctagtttgcagatgaagccacttcaagaagagttaacttgctcagcctggcaggtagggttcaacccagaatctatgccaccttgcctgtgcccagcagccaccttgtcagggttactctagactctgtgcgtggtggcacatgcaggaaggacaatggaatgagccaagctgggacggaggagttaggaaagtctctgccctggcatgagacagagagctgtattgaggtagcagaggaaggtgatgttaaaatccagtgtcagccagtgggggctgagatgggaaactggtgctccaaccccagtgggatttacagaagcctcctgccacacggtactcaccttctgttggctccatggatccgacctggcagacttctcttgataacctcagtgccctattgacactaaagccctcaaaggaacctggcaatcactgtagatctgaggaacttctcctttccattttcttggccttattttcaaaaatctctcagaaataaaatacaaacaaaacaaaacaccaaaaccaaaacaacaacaaacactcttcagtcagggcaactctctacaggctatgacaactaaaggttccaggatcaggctaccttgggtgttggagagaacataagacaccaaggtggggtgaaaggagaggggctcccacacaggagtcacaccaatgattctggatctttctatctgaagagctctcctcattagcctgtctgaatttctgaacacaggggtgtagatgggctctttctgctgtggtttaaatgtctcctcttgtacccaagatgacatttgattgctatcatgatggtactgacaggtccttacaggtgagataaattccctacccagtgataattcagttatagaagcagagcatagactaagacactgtactattagcgttctatcactatgacaaaagtcccgaggcaaacattttataaagaaaggtttatttgtgcctctggtaccataatgttatagcaaaatcacgtggtagaaaaggcttgtttataccagtcaaggccccaatacctcctgtaacactacaagatccctggtgggatacacggaactttttcatttctgctttgtaggtttaaagcagagctagcgccccagagccagtgagtgggttttatattttatatgtttttctaaagcaactgggaaattttgttttttgtggccagacagattttgggggttgtttgtttgtttgtttttaatctgtttgtttttaatcgggaagaagacatcaaggagtttacaccaggtcccgtgttctctgtgatatctcagtgtcccatgtccatgacacctaggatattgcactcttgtgaatgctgtgtgacccgagggagccagctgagaagggaagagtgaactctgagcttctaactctgaggccagagaggcagttcagctgtgaagagtatttatgctatcacagaggacctgggttccatttgagaagggtcaccgctcttgaaaccccagctccatgtgatctgatacatactcacagacacatgcatgtatacctaactaaaaaataaaacaaaaaattttaaggtgctgaacccatgtgaggtcatgtttgttttccatagtatatttgcatagtagaaagggagttttccctccccttctttttcttccattgcatgcttctgtttggatagcgtggtcagggaaaggtcacaccgataccagctactctcagaagttccaggagagcagggcagaccgaggaccctggctttgcagggagcagagcaaacctcagaagggtctttctgatgtttgtctctgcagaattcgtgcactagttagcaaatacggagaagaaataatgccagacttggctcaaagggctctttgacccctggggccctctacacctcacctgggcaatcagggagcagacattggtaaataaaaacgttcccaagaattgatgaaaaggaaaaataaccacctcaaattcccctgaaaaggaacccattggaaccaggtcacaggacagaggtgggatcatcaacagattagatagggtatatgggacactaacacatagctcagttggtaaaccccttgtctagcatgtacaaagtcctgggttgactctccagtactttgtagactgggtgtgatgccccacacttgtaagccctgttcttgggcagaggatagaggatcaagagtctaagctcattctcagttatactgtgacagtaagtttgaagtctgcttagactacatgaaacgttgtcttaatacataaataaatagataaataaataaaataaaaactgaacgtaaatggaagaataagtttacaaccttgaagtgggagcaaaaaggaccctgagaggcaaatcccagaggagggttgggggaagagtcgtaagtctgctttcatcaacatgtggaacttctgatttaaaaccagaaatcgctacaaactgagaccaagacaggtggcagagaacacttgtaacatattgtctatgcatatatatgcatatgtgtcagtgtgatatatatatacatatatatatatacatacatacatatacatacatatacatgcttatagagtcatagccatatttacgcataatatctgcatacatgcacagattctttttttaatactttatttacttttaattttatgtgcagtagtgttttgcctgaatgtatgtctgaatgagtgtgtcagatcccctgaaactggagttgaaattagatgtgagctgccatgtgggtgctgggaattgaatctgggtcttctagaagagcaacaagtgctcttaaccactgagccatctcatcagcacatatgcatagactctttcttgttagacacatctgtaatctagcctttgggagtctaaggcaggaggttcaccagttagagagaagtctggctggaaagcaaaagcttgtctcaaaacaaaacaaaaattctaggttgttatccagacttggtcaggaatacctagtaatcaacgaggaaaaaaaaagttcaagagtaacaattgaagagaaaaatggatgaagtagctggccagacgattcacagaaaaggagcatggagagtgaggggctcttgcttcatctacgagtgctttccagtgaatgcttctgcttgggttaactatataaaaataaagttaccttaaaattaaatttgagcaaaatgatacactcatttgccaacatccaggcactgggtctccaacaaagaagccattttgtatgaaattgggtagtcacagaactatcgacagaagaggggacagtgggtgacaatgagtcagggcagggagaatgtgggtggcacagaccctgtgcagttgtgcaggaccctgcctagccccgtgggactcagtaggggatggacagggatgacacatgagcagtggaagcgactctccatttgagttgaagtgacatacaggggctccagggcctggagggacttggacatctccagaactgtggactctgatgtatctgtccctgggctacatagcccttgatctcagagggtgagggtcattttattcctcacactactgcacatttaaatgattagaggtaaattctatgtagaagggtttagaatcaaataagggtctctagtttgtagacagagaaagcatcactaacattttttattatcttttctggcagcttctttcctttcttctgactttcttcctcccttccttctctctttcctcactcacctatctttttactcctttacacaacatatattttacacagcatcccttccaagcactgggctctgtgctggcttcccaagacaaaggctaactagctctaccctcaaggtgcctgagagtacagctggggagggaggggggctgtatcagtcaaaggaaggacactggcaaaccatggtgtacctggaaaggagatgctatatggtacagccccgtggtccagattcacttccaactgaaagcaaacttccatccctccccaccatggttccttaagatgtccagggctttctgggaagggggctctgattgagcccttgctgtgcactgcaaccgcaccaggaatcttaggtggcttctcttagctatcaggccacttaggtctgctgtagcctcccatgaacttacactttccagtgtgattccattagaactagacccaccttctggaagagtaggctctttcaccactgagaatcaaaatagctatggcacttccatgatggacacccagagcctagccctagctcagtaatgcttatgggttgggaacagtagctgagagtcaatgatggagccaggactctctgaaattcactgcttctcagaagaccgcacgcctccagcccacacctgtgacaagccctgttattttttgtaataatcggtagagcatgcgaatatctctgctgttgtgctgtgttaaatcctgctggagcagccaacaagctttgtagcatgagaggaagctgtaaagcccccttgccggacctccccacacccacgtggctcctaaccctccctacctctcccctggctccacctccctccagcccaccttctgaggttacaccttgctgaaccccagcactcatcccaagaaacatgcgtatgttttaggacagagcatgcaccgtttgtggagatattttatgacaaagttcaactaagacataggaatcatgggggaaatgtcccagaattctcatggtttgtgggacatgcaagcaaactccagatcacacttgtagttggcagaacccttctataagaggccactatgtcattggcttttaacagccacttggagtaaagtctattatttatttgaaaagagacaaaattaagaatcaccttcggaatccagcacaagccttcaaaagtccaaaagatgtagaaatgtgaagacattagcttcctcccactcttcctaactagagcaagttggtctcctggacattgttggcctatggggctaatatgacttcctagcctgagagcaggctggaaagacccctggctctgcgtccccacagggtccatctcccctggctccaccccctggcttcacttccccctggctccacctccccctgtggctacacctctcccctggtctcctggacactgttggcctcctgggcaccatagtaccagttaatgtgtggtgtctgtatgcaagttcctcatctgttctcccaaatacaacagcctgatgtggactaggaaggaggcaccgttttggtggaaccttttatcttggccctgtctcttgactcttcattgcagagagcatcttcctccttggctctcctgaggtcccttcccctgccttctctggcttgtctctgtcctgtatccttggagagtcttatttctggttctaatagtcctgagagccacttgctagcaatattgacaccatcaaaacccaccaccaaagcttcttatcctctgaagcctctggatctcccactcttgcaggctcatctctactgctagggcatcctcagaagcaagccatggacgtgagttacaccattatgccagatgggcatggttgaaaggatgaatgtcaagatgtcggagtaggttaggagatggggtccaaggatgaacggtccaagaagatgaaagtacatagaaggttctggcgggaacagggacatattggcatctaactaactaactaactaaagagaacattctgattgatggagagacaaacaaggactttgacctctccagtgctgccaccaagcaagagtctccttcatttgtaatttgtggttattttgtttctgttttaaaaaagtaaactgacacacttagtctctctgtttctttttttctgtgagacggaacaccatgtagcccaggttggccttgaaattcctaagtagcctctgccaccaagaacttgtgagtcttgtaacaacacgtgtgtgccaccacacatttgatggtgtgctgcaattgaatccaatgctccctgaatgccaggcaagcaagcactccacaaacctcgtgtgtcttgtgtgcctctttcatttcctggctttaatcacctttagtctttgtgtacagctcagtttctcaacccccaatatcttaggtggtttcccttagctaccaggccatctagtcctgctgcagcacacataagctcacagctgcagtgtgtgaagagattcttccagaagggcaggttttggtgtccttgcctgggaggcctgatggcttccatctatgtccccaggtgccacatggtatttgcctaacacttctgtaccaaccataaaaaaaaaaaaaaacccattcggcttttaactcaaactcaactagaattctaacccaaggactcagctctctggtgttcatctcagatggccagaattgagaacttgcccaaccctgaacactagcaccagtgtttggcaactggtgtgtgcgcctggtctggctttctgtttgggagtctctagggtgatgtgtgaccagataagggttgtaatgagagagggagggccttgggggtgtccagtgaaaagacagctgtaggaattaaacagagaaaagctgcagccctctgtctagacaaatgagggtgcgcagtaggtctgcagggtgactcagaactgctaatgaatgccccctattcatgagtctcggcctttgtttaagtccaggcctgtatttaaaaacaagaactggttgaactggtctgaccactgcaaaggctgaacacttccccccaggcgggtactcaggtgaatgaagtcatcgatattttcttattttccgtgcagttccaatctgtgattaactattatctcttccctgaaacaacagcgtccctcagactgataacaaggaggagggctgggggtgagtgtggaggggaattggaagcccctggggaggcgggcttgcactcccaaccctgacccctgtaactgcactgtgcccagatgtccctgcttcaaggtcccttaacacaaagcaaatggccaacttcctatggcttcttcaccttgttaaaggctccaccacacaccaggaagtcttgttagaaccctcttgtaatgtttgagtctagccccatccaaccctatgagcaactcagctggcctcacctcagaaacaatcttgcagcctccctccctccttctctgctgagaccagagttccccttgtcagagcaaagctcctcctgccagaaggtttgcccttggcactcactgaaagtgtgttaaaaacagctgcatctcgaacccatgaaaaacaaaataggtaaattaggccgatgaaacccaatacctcaccccaacaccccaatctatattgtatttagtcccttttgatggacataaacaaaccagggaggttactttgataacagtatagcaacagagaagacaagaggtgccccttggtgcatgacttctctgatgaggaatggtggtgatcagagccaggactgtggaaaaagacaacctggtgtctaggatgccttgtttaagaagacactcttctcaggtccctgaaagggcagagctgacacctgaaaaagaatgtgtccttttaaattttgcatcttgggctgggcttgtctggcctacactggcctggtgaagacaggtggtaaaatgagttatagatctaacctagggacagctactaattggtgtcacctaattgttggtaaaagggagcatcgtggccccaaaatgcaagaggctttcagatattctgtaggtgatctgactgcatctgatatcatgcggctctggggttgagtcactcatgatctcccaactgcaggaagagtttcttccaccagggcctcagctcaactccatgtgactccagggacaggcacagaatgtccaggggcaaatggactcatgagccttgagttagcatctttattcatcaagggtatgtagctgttctcagtggtcctggttgccttgagagagtggcctccctggtgtgcagggcatggccctctgctgattttagaccagggcacatgatgcttcctgtgacttctccccactgcgggtattgcagcagggttgggaaagcaggaaaaataacttagtagcaagacacaagacacatactcacaaactaattatgctctgaaatctgtcatcagctgcagcaggtgtagatggccatgactcagctactgtaagacagaatgaatgacaattgaaggtgacgataacacttataacaaatgaccacagaaagtctgggagttgtacatggcagatgccaaaagtagtgaccaagtccttagggttccaaagctggctaacaaatgtacagaaaaccaatgcacgaaatcacaggtatgaatcttgtctcctctaactttaccaaaagttaagaaatcatcattagagcgggagagatggctaagagtttaagagcactgattgcttctccagaggtcctgagttcaggtcccagcaaccacatggtggctcacaaccatctgtaatgagatctgacgccctcttctgctgtgtctgaagacagctacagtgtacttacatataataaataaataaatctttaaaaaaagaaatcatctttaagacatgaaaagcactattggtacatgaaagatttgggaaacaaaatcagcaaatattacttaatgtatgtgcatgtatctacatgagtatgtgggtaagtatgtatatgtatattatctgtgtgtactcatgtaaatatgtatatgtattgcactatttgtgtatgcatgtttgtgtgtatgcatgtttgtgtatatataagcatacatttatatatgtgcttgtatatgtgcatttgtgtgcatatatatgtatgtttgcatatatacttatacctgtatgtgctttgagtgtatattttcatgtctatatgcatgtgtgtgcatgtttgtgcatatgtggttgtatgtatatattaaatattatatgtgtatatgtacgtgtgaaaagcttagcaactaaagatagtccttgttttctttgaagaggcacagagaacttaaaacttaagcaaatcagctgggcatggtggtgcatgcctttaatcccagcactcgggaggcagaggcaggaggatttctgatttcgaggccagcctgagctacagagtgagttccagggcagccagggctacacagagaaaccctgtctcgaaaaacaaaaaaacaaaaacaaacaaataaaaacttaaccaaaccataggtgaccagggactttacaaacatttatacatcaccaatatcacatggcgatgcagttaatctaagcctattaaaggaaccatcatcaactggaaaagcatcccaaattcacatgtttgacaacctcatggtcacttcataattactcagaagctgaacagggaattaaagctgaaatgtactggaactgggggtctgaggcagatgagtctccagactcagccatgtggccagtgaggattgtatcataagattatgaaaggctgaaagtaagcgagctgagtgttcaaagtaggaattataggaaatgtctttagtgtgataaaagatacttatcaaaaaatgtcagcactataattggtggtgaagttccggaatcacaccgatcaacaccagcaggaggcaaggaggccattgccaatatttttattcctcagtttccaggaagccatacccagaacaaggagacaaaagacatggagaagaaactcacaaagaagcagagttggccttcttggcagggaatgtgctaatgctactccacaaaaactgttcaaaaacaaacaaagtcggcaaaatacatccaatagaaagaaggctgcagatgagagagatagagagagacctatattacttaaaaattgtcatgtagcagttcaaatttttattagtaataaaaatctcatctataccagctgtaaaacatttctgcttctacttagcaaacatatgcaggttgtttgggttttcactgttaatttcattttctttttgagaaagctctaaaaggcggggaggggtggggagcagtgagtgactagggcagcttgatcctggttgtcactggaaactggattcaactggataaagacatcacttgccatctaaagagaccctgaattcaatttatacacacccacaacttaaggggtgtttttttgtatgtgtgtaaaacttaataagaggaaaatcatcaacactaattataaaacttgattaaagagaacagggcattgataccgaaatgccagacatgtcaaagccatcaaagaaactcagaaatggccacacacacacacacacacacacacacacaccctgcacacagggaatccaacgtgataggagcaggaagccaggccagtggaaaaccaagtagctccgcccaggattaatgggggttattctagataattcactgtccagtcatgtgacaacagatcatatgcataagaatggttagatctctatacctttagacaagcaagaacacagaaggtgaaggaatatgtaagcataaaaagcaacaaatctaaataacacaggatcgaattcagaaggtatctttctgaacttagagtaagaaactatttttcctaaactagatgcaaaaaattaatagatcacttagaataataattaaatctataggaaacttttgtttgttttgtttttcaagacagggtttctctgtgtagccttgactgtcctggaactcactctgtagaccagactggccttgaactcacagagatccacctgcctctgcctcctgggtatactgggattcaaggcatgtgccaccagcaccactggcagaaaacattttaaaagacttatttatgaacatatcaaacatcaagccataaaaggataattacaatgcaatcagagatggacaggaggtcaggatccagaatagaagaccatctgtcaatcagtgagggaacaataaatggcttggtgaagaaaaataaagaagcaagtggcacctgagagccacaaatcgaggagaagcagcagaggaaccctgcccagcgctcagaaagagaatgtcccatgttgtatgtgggcagcagtggagaggaagtctttcagaagcaatggggttagacaacgtcatgggggcaggagctcatgatgacagggggtttagaagaagagaaagaggaggaggcagggaggaggaggagcctggttttcttcatcttgctgtacagtatcttccatcacgttaggatgcagtacaaggtcctcactaggtgccagcaccatgcttcccagcctctagaatctcaatctgaatagacgtctcaccttcataaattattcagtctctagtactttgttatagcaacaaaaaacagagtaagataacatctgtattagttgaggtcctccagggaaactagggtaataggatatatacctgtatagagatgtactttaaggaacttgttcgtgccagtatggaaactactggagtccaagttgaaagaacagcagaatggagacccaaggaaaagctgaaaatctagtgctgtagataaagtccccaaagcagcttgcctgaggaacctagcctctcattctgtcagagccttcactaacacctagatgcacccccatagaaatagctcagagatgatctgtaacattaaccccacaaaatttctacatcagattggttgaagtatcggtctactaatatcaggagttgctacaaatggcaaacactgctggggtatgagaagtcagccttcccttgggagaacagagcttcagacttgagaaattgacacacatatacacaaatatttaaggcatcattgtctaaagtagcaaaaagtgaaggaagaaagcaggcttaaagaaaccagcatgagccagatgggggtggcacataccttgagttccagcactcaggagacagagacagtcagatctcttgtgagttcgaggccagagcaagttccaggacagtcaaggctacacagaaaaaaaacttgtcttgaaaaacaaaaataataaaagaaactaacatgaaatggctaacttaatcctgaaacttttggtgacagaatagtatatagttggtaaaatataagtgctagagcaacatgtatccatatgggtaaatataaacacaaccatgagcaacaaattttagaaggacctgtatagcagaacagacttccctaaaacttcaaatcacaaagcaatcttatgtttcactcatgggtatgcaccttaggacaactgtcaaaaacatgtttgatattcacacacactaaattcaagctcatgcctttcttgagaaatgaagatgagaattgggttcaggaaagccttgagctatgtctataatgttttatatagtggttattactcttgtaagtcctggatcaagtatgggtaaatattaagatctgacgagacttgtggtggtcgtatagccgtcaacttgactatatctggaatgaactacaatccagaaacagagggcgtgtgggcacacctatgaaagattttctacttggtttgaagtgggtgaatccacttccagtctggacctttgaggcaggaagacacacctctaatctgggacacaccttctgctggaagcctgtgtaaggacatagaaggaaacttttgttctctgcctgcttgccctcactttgctagcagatctattcctttgctggcattggaacctactccttcatggttctgccatatgagagagaggaggggggaggagagagagacagagagggagaggaggagagggagggggagagggagagatattcattcattccataaattctggagaactgtgatcaatacaaaaccgtaggggtgagatactctgtattccccatgcccttttttcctgtccacatctttccaaacacatgttaatgtgagatggagcctcaaatgagctgtccttgtgaagatgtgtgcggatgatgagagtatggtcctgtgggagtgtaaggatcacaagtggcagggccatgaggcagagggaggattgggtacacatttgcatactacatagtgtgactaaagaaattagccctgtgtaatatatcgggtggtggagattgggtaccaagcgctgtggacagccagagatgatggtcccttgttgagaaaaagggcaaagatctttgtgctatgtacagcgcaccatggtcagtgtggaagtgccacacaagatttggggtgggggtggggcatgggattaccgcataaggtggcagggtagtcatacatggcataaggacattacagcagaatgtgggattgtgcgtatgaaggttgtcccataagcttatacccctttgtgacttcttggccgtgttagtggataagtgcactctaggatgtttgtgcaatgcagacaaagttgtaaacatttggtgacacatttctcagaatctgtgtttagacaacttttgactgtgttttctctaaagaagagttgaactaatgctggaggttaagagcacttgctgttcttgcagaggagagttcccagcagcatctcacaacggtaaggaagcacacagttgcctgtaactccagcactatggtttctaatagcatcatctgacttctgcaggtaccacatacttatgtatgagcttgctccttactcacacacacaaatgaaaccatggaaccctccaaaaagacatatctagaggaaaagattgagtatcacatggcagtcaaccctcatgacccaatcctgaaaacacggaggggtattgtagagccttctgccaagactctgtcagcctttgcattactcagaaaccttgtctttaacctcatctggtaccatgtgactgtccccaaagacatggtgctgctcacagggctgagaggtaggaagccaaaggtggaggagaccagtatcctcaagctaatgaatgatttgccatctcctgctgtcacccgcacagctttagctgtgctctgcttctgtgaaagggtttgacggcacgaagtacccatgggcatcccagtcgggatgaggaagtgagcaaaggacagaggttggaggaggaaatggactgaaaagtccacattggctctaagtccctggggtaacgcttgggactgtaggaatccatcagtcccaccgcaagtgtctctaagcatcacagggggtcaggggtgttggtttctgtccttgtcttcattctttcaatgggaaagttttaaagtactcagacaaagccttaaattctgttagctgtgtttgttggttgtgtaaacagacacatccagttgtgtttcctctcctagcgacatgcccattggtcccttaggggacctaccctctgctgaggaagcagacactcccccaaagctagtgagtgctgtgtgtgtttgtttgtttttgctttattatattgagggagtacacagaacaaggctctgtctgggttgtaaattttaagtccacataaagcaggtatacagccgcacccagagaaggatgcaaggaaggacagcatgacaggcaaccccttcctgatctctgtgacagtccagtcattgccattaaaatgtgggcgtcagatgaagatgaagagaacagcccagcaggtgtttggacccagagcctgcaccttactctcacttctatctgcgtcaattctgagaaatttcttaatcgccatgaatccgggtgtaaccgaacaaagatcccaggaatgacaaaggctgaagcaatggtattgttgttgcctaaaggcttggtctgctccccacatgatggaagccaactaactgtccatgaggttctgacagataaacccctcacggaacctagagctcacttgccagtctgactggttggcggataagccccaaggatcctcctgtgtctacctcccctccccggccctgggctgacaggtgtgtgatgtcacgctcagctttgacacggattctctgaatccacactcagctgctcatgctttgtggtaagtactttaccaatcaagtcatctctctagccctgataagttttttaaggacagactctaaggaggtggctcttctctttcgctgatgtcactgaattcagtctttggttgccaaaaacaaaaacaaaaacaaacaaacaaaacccttatatttagccagggacaccatatatcacattttggttttatctggccatcattttcatagctgagccaagtcttattcaactgtggtcagagaatccacaatttgctttttgctctgagaacttgtttgcagttttctcggtattccaggacactcgctctgttttctgcccctccccccagctctttccctttctacatatgtacacacgggcacacctttatgtgactatttaaaccttcattcatccattcgtttataacacctccaagacctctgtgtttgcacaaaacctgaccacactggtgtttgtgttgcttgtaatatgttctctatattgcattgtaacatccagagactcacaaaactgccctctctggtcttgtctgctacgtaggccgttgcctgtcagacggttagcccttctatttgtaaatttcagcttgagctacagtgcaaaattctgtctcaaaaacaaaacaaaacaaaaaacaaaaaataaacaaacaaacacctttgaatctatactgaaaagctgtttttcctttgcttttagttcccaaacagcaatcctcacagcaaggctcagagcattcgcatctcccagcctctgtgagagctccagagatcacccaaaaggactccttcctgcctgggaaatttctatttatttatttatttagttagttagttagttagttagttaatgatctgggatctctctataaaatgggtacataaaccagttgtgatagtgacacaagtagataccctgaagaggcagaggcaggaggatcgcaaactcaaggtcagcctgggctacacatttaaaaaaaaagggggggggggggcacaaatcaaacatttgctgtcaacaaattacaaaaccccttattctaaaacatataatatgcatgtaattattggtaatttagtaaattaccatttactaaagatcaaagcaactttgcatattaatgagacggatgtgcctgttagctttgcataaagaacggaatcttgcctgaatgggtgtggagcacctgtagcatgactttgtgactgtcagtgcagagaacagggctttacacaaatgtataaaatgagatgacagaggacatctagtttcacctcagaattattgaagattctgtgctaatcgcaagacaaagtcaatctagtaattctttgctaaattcaagtcagcaactcaaatgacaagttttttaaatccaatgttctaaaagaataaatcagctttgctaattgacacattctggggagtggacagtggaaaaatatcaaatgtttttattttcctccattacagtactctgttcctacgaaatcaaaaagctctgtacacacagttaaaagcactgaagtccgaaccgtccgataccctcacatttgaggagccgtgggtgtttagacatctttgctgttgtcctgtggtgggatggcaagtgcagagcaaactgactgaatctgtcgtcagaacaggctgcagcagggattttacaagccaggcaagcagggtcagaatcacttcaaacgcatcacataatttatttcggctcaattttctctttctgcattcagaaaccttttactgtacctaaaattttcatgactccctcccctaattagcctgaattgtcacttattgaagtccagggttacctgaaagaaaaacttccactgagaaatcgcccctgggtaattgattggcctttgggcacaccctttggggattatctttttgtttatttgtttgttttggggttttttggggctttttttttcaagacagggtttctctgtgtagccctggctgtcctggaactcaagtctgtagaccaggctagcctcaaactcagaaattcgcctgcctctgcctcccgagtgctgggattaaaggcgtgtatccagtttggaggttatcttgattaccaattggcatagaaggacacagcccactatgggtgaaaccgtaccataggtagcatatgaaagcttagcgaagcatgagcctttgagtgttctaccatggtttttgctttagattcctgcctttgcgttccaccccgacttctgtcagtgatagactatgtcctagaagtgtaagcagaataagccctttcctctctcaagttgtttttggccagagaaatggggcacacacccccccccccgtcctttacacatcctcgtagagggttttcatctacagtctgcaccagcaggtgccatgacctggtgctgtccacagaggccttgctggttcctggctagttctgcctcactcctatcacaacccgctcaccccttcttctctgatggcctccctagaggacacactgaaatagaaaggaataatggggggagggggatgaaaaaagaaggaaaggagggagggaagaagggagggagagaggaagggaaagagaggttgtacaagtcatggaagtacatctctgtgatcccactagttctttttcctattgctgtgataaaacataatgaccttgcttctctgtgggcatcaggacagatgtttacaaattgttggagattatagagttgtagatcctcctccaacaacttcactagtactaagtagttagaaatgtagtcctcacccctcatcaagaaaacctccctgtacatcaggcaatcactacagaaaaccacaaccaatcaaaatgcagacttgtgtagcctagtccgaatgaattcatctacaaaacactcccaacacccaaggctcggggaacattgtgaaagagggattagaaagattggaagaagcagaggatcagggagtttgctgggagattgttactactagtaatagcagaacctgcgcctataaagtctcaccaataccactgcccagatgtgagctgaatgaggatggggccaataaacacgccaaattggacagtctcacctgaagactgaatggacgagcatctctttccaagccccagggaagctcggtcctttgagagtgtgctccatggcacacccatgagtatttgtgttacaacctgaactcttgtagacagctcatggcactactcaagagtctttggtcaatttgctgaaaataaggtccaaaaatctcacagcaaaaagacaacacagactaacaggagagcttggattttccacttcctcctcacttctcagcatcccattcttcacccatacagtcaggagcaggcttctactcattggtccttagttgtctccagctctggttctgtcctaaagtctccactgcatccgttttctctgatcaagctcacacagcatagagatggaaatacacccacctcccagaattcactgaggctacccaggcctttttgtaacctttgacatttctccattgcagttttgttttttttttttttgtttgtttttttcaggattgggataccaattcaactgttgtatgaaactattcctggagaggtgtgaacaaatgtccactcatgcccgatagggaactgatgacagagcaataatcacccagagatagctgcatcacccaagctcacctgagaatgaatgacagtgcaccaaagttggggacctggagcacaccacagagcctgtagcagctcaataagttggagtgtcctttccaggccacttgctcactcttagcctcattcagcatcttgtcttgttgaggattcactctctttcagattatatatgttgtgttttatataaagataagaaaagagccagggatatgttcagtggagacacaatatggtgtaggggaagggggtgcaggcccatgctgagccatcccttcgctctgaggtaccagccacatgaatatagtatagaatagagtttattgagggcatagggagggaagttgagggagtggagacagagaaaggcaaagagagtggggggagagagagcgagagagagagagaaggaggaggaggaggaagaagaggaggaggaggaggaggaggaggaggaggaggaggagaagaagaagaagaaggagaagaagaagaagaagaagaagaagaagaagaagaagaagaagaagaagaagaagaagaagaagaagaaagaaagaaagaaagaaagaaagaaagaaagaaaggaaggaaggaaggaaggaaggaaggaaggaagagaaagaaagaaagaaagaaagaaagaaagaaagaaagaaagaaagaaaggaaggaaggaagaaagaaagaaagagagagagagagagaaagaaagaaagaaagagagaaagaagctggccatgagcacgtggagagagaggggaatggggaaagagagagaagagggtaaggggcaagagcaagaggagatgagtacaagagagtgagaagggggcaaggaaccccttttcaagtgagtcaggcacacctggctgttatcaggtaactgtggagcctagatgaaatgccaacaatgtaagtttgggacagaacgagcctagtatatttaagttagtttcaggaagttcctgaaggctttgagttgtttcctttttgagctccaggagcttccctgcaggatgaaaagcttctcttctccttagaactgtggttctcaaccttcctaatgctgtgaccctttaatacaattcctcaggttgtggtgacctccaaccataaaattggttttgttgctacttcataactgtaattttgctactgttatgaatcattatgtaaatatctgttttctggtggacttaggcaacctgtggagaggtcctttgacacccccacaaatcctgttgtctcaccttcctcctaactttctgtatcttaacaagcttctctctgagatggaaggctctaatctagaaaaaccctgccatccaacatcaagggcctgcccactatctttgagtgtgacagaattccgggcatggtacaagagtcaggattccttggatgagaccacttatgatgtggagccatagaagggacatccccattcattattttaaaatactcatactaagtttctgatttcatttttatgaattatcggtgactttcagcgggtagagtgagactgaagctttggaccaatgggaaagaactatttgccacatatattcagacattccttctataaagagggaggaggcatggaatatctaccacagtccctgctaactacataagccttgactatgtgataggccaataactaatttttgagagcaaacaccttcccagcaccccagtcttccaccttcttgcccagagtctgtttctcagcttcctttatagtaatgtagaagaagccagccccaacctgtagaaacagtctatttctgagaccggggcacacaattgttcacatttgaattattctaaaatcaggatgtgtcctatactctgcctagtttctttctttctctttctgtctttcttttttgttgttctccgacaaattgctgctagaacaacggtgtgtcttacaattgatgacatctcagaaccaaagaaatcagcagttaacatcacgggctggcatcctaacatccacccatgtagacttctaggagccactgtggagttgtatcttgctttgctctaaaagtcctttggcgtaaacccggagcaaacagattcttaggttccctaggtcccctgaccatgccagaacacagcaaacaaaagagcacacgtgtggtcagccacaccagcctcaccaacagtcttcctacttctccatctgaacagctgccagcaacagaaatgatctcaggacacaaccctctcctgagcctcttagaatactctggaagtcagtgacccgagttgtatcaagcaagccaagatgggaacacaattccagggaaggcaaccaggctggaggggagagtgggaaaggcccagcaccaaggggcaatagcacactgtgcagcatccgttggtgcatctcccagggtgcacccctcagcacctaaaggctgatgcagcataccacatctgccaggagctgacaagtgtgtgtggcccgcccctttcttagaaagccacagcacagtcaaggctctaagaagtcctgtagcagagaaccccggagaactttggtttaatgcatttgaaacttatcacatcaaagaacttttttttttaagtatataatttagtaacaccctttaacatgccagaatgtgaagtgtctacagaatagctataacagtcctgccctgtacagacccatcaggaactgagtgacaaagtcatagatctccagctgaccatgggacaaagaaaacaagagtgaagaagtgaggggcaaaacccggaaagacaggtgtcagagcatgcgtggaaatcctcccagtgggagcactcagccaggcacctctacgagactggctttgtccgccctcctcggtttcagtgctgaggactggtgttaagtcttgtagggtgttgtcttggacaagagccaagttgcttttggtaaaaccttttcttgaaatggggacttctgtgcccaaaagtgacagaaactgacaaggcttctctctctctctctctctctctctctctctctctctctctctctctctctgagtctgagtacttcaaagatagaaaggaagaaaaacactgggaagccacaaactgataattaaaattatggtggccactggagatgtacaggctaaacaatgccacaaaggactaggaaggtgtgaatttgttggtgacaccatttctgctgctgtgctaaaataccctgacaaaagcaacttagaggagaaaggggctcgtctaaattcacaactccaggttaggtccaccattgtggggatgtcaaaggcaggaacctccaatggctagtcatagtacttccatagccaagagcatacagtatgtacgatggccaagcttaggtcagtttctccactcatacagtttaggaccccatgcctaaggaatggtgctgcccacagtgggttagttcttccaatatcaattaactcaagacaatcctcctcagatatgtccaaaagaccaacctgatgtgggtaataccccactgaggctctcttctcaggtgattctagattgtgtcaaatgacaattaaactaaccagatggaaaaggaagtgtgcctgaggtggtaacaaccaccccgtgccagaaattcctggggttaactcttcctcatgatagcagggattctgggaaacagcagccgggatatttgtgggaattcaaaagaggaagtgatactccaagtttgtttccttttttttttttaattgtttttgcagggctgggggtgggatctaaggcctcacacatattaggcaagctctatcatctgagttagtcctcaactcttcatgcaaagttctgaagggttagctgttggatgaagttggtagcatctggaagaagcaggaggcacagtaaaggggccgggaaggggctagctggttgaggttgggaatagtcatgagaggtgaacccatggtcagagacctgagagacccacgtaagtcagctctgtagatttctccagttgactataaagtcaccagcatctggtattgcttccaagctggtcacagcttctcctcagactccaagcctggctgttgcaccatcaactgtagtccccacccttccttctgcctcacacttgagcaacttggctcaccccactgatacctcaggctgcccagaaggcatgcaagatcgcagcctatattcaggccttatgaacagggtcgtgttgtgcaggaaagggtaagcaagagttgagatctagtttctaccagtattgattacttttctagttgctatggcaaaaagcgatttacagtgggaagagtttattttagcttatggtctggggggtacagtccgtcatggtaaggaatgcatggtgacaggagtgtgaagacactggacacattgtatctgcagtgggaactgggaagagtggatgctagggctctgctggttttggtttcttctcttactactttttgttcactctaggaccccagttcatggaagagagctgtccactttgaaagtggtcttcttccccagttaaacttctctgatcacgggttctactctctggcacatccagaggtgtgtctcctaggtgattctcagacacagaggtgtgtcttctcagtgattgtaaatcttgtcaagttgacaatcaacattaacgcaatcccattttccaaggtgtgacacagggaaagggttctcttctctattcacacaaaagcaccttgcaggctgtgcccacagtctggtcccaaatgccttactctatattctctactggccacaatggacttcctagctcatgaagaccaatccaggagagctgaggaaaagtggatgctgaaacatgatggttcagatgtttccatttacaggggtgtgtgtgtgcatatgtctgtgcatgtgtgtgtgtatgtatgtgtgtgtgtatgtgtgcatgtgtatgtgtgtgcatgtgtgtgtgcatgtgtgtgtacatgtgtgtgcatgtgtgtgtatgtatgtgtgtgcgtgcatgtgtgtgtatgtgtgtacgtgtgtgtgtgcatttgtattgtgtgcatgtgtatgtgtgcatgtgtgcatttaagtggatggatgctgatggctaatgtattcagctttgaaagatagtaactacctaactggagctactttagacaggaaattccattggttacaactctagatacaattgcttacagaatacaaggattttcctctccacccacttaatcctgtagagagcctatttttattttcttctcttgcagatgaggaaatagaggcttccagaggtgaagggattggccccaggccactgcagttagcgctactccaattaacagctgttgtccttgtctactcggagcacttcacacatttgttcattaatctcatcccttgagacagttgctgccactctttcccgccctaacgggaggttcagagagagcacagatgtgggattctactgtcctctgttctcatgtgctgacagctttgcctcctggtacctgagctgagatatgcagggtgcctcattgggaaactccaaagcctccgtacctaccagtgtggctccaagcagaggattctgtgtcatttcagcaagacagacctgttctacaccctgctctgctagggtctaggtaggacgagccaggactagaggaatggactgttgcttacccttcagtgcctcctgtgtttcctatgggacaagagcacagcctagtcactgtgtcctggctgagggtcccagtgaagggacccacagatgggactcctagctggtgcctcggactcagcagaagatggagaccggctcttctgccattccaggcagagaagacagcactctaggagcaacccaggcctgcatactgagctactgcagagccagactgggatggactggtggacacagctaggctcaggacattcatatacccagtagtgtggcaggttcttgcctgcttacctcttgggagtacagtatttggtatagactagcactgcccaggaaggccctgaatatcagagactgacagaaagaaaggaagacgggagggacagagaggaaaaggagatgggagatggaggaaggggaaaggagcagaaagaaaggctccttctccatctgaacaggcagaggtcactgtagaggagttgtgcagacccgagtggggcaggaggatggatgtctcccatattttgcagattctcaggtcagaggagcctcccagggttctagtgtgtagataaaacatgagttaaatacatggtgaagggagccagagacaagctcaattagtaaaaggctcaggccccaggtcccatgtaaggaaatcccagtgtgctgcctttcttcgctcataatcccagcaccaagaaggtggagacaggagaattcctggaacttcacttgctggccagtctgtctatcagaatcagcaaggcccatgccaactaaatgatctctctcaagatttttaaaaaaacaaacaaacaagcaaacccagaggcttggttcttgagatgtaactcccgaggctggactgtcttccacgtgcatttgtatatatgtgcacatatacaaataaatacaagcagaaaaaaatatctacaaaagcagacgtcaggctctgcctgctcttttcatggtgggcccctcctattcgcacctcccaagggtggggatgacagacatacatagcaaagcccagtttatgccgtgctagggagcaaagcataggctctgtgcatgctgagcagaaacacgactaatgaagccatagcctcagccccacttcctttattatgattgcatcatgtgtattatttccagaaaattaaaaactagagcaaaataaaaggagaaaattaaatccagctaaaatctaactattgcaactcatagtggtgtgctgcccagtaactctccagtgtgtctatatctacaccattgcttatgcctgagttgtgtatatttcagtcatccatccatttatacatgtatacgcatccatgaagaagatcatgcatatgtatatgcagttatacatagtatcatatatgtgcatatgtgtttgtgaggttgcccttggcatctataggggactgcttcctggagcgtctaacctctcagatgcccaaatcttataagtgctcaagcccctcatataaactgattcagtatttgcaatggacctgcatataccatcctataaaatttaaacagtcctcagttaacttagatgttgtgttagtagttgtatcatttaggaaaaatatctgtcgttgttaaatacaaatgcagttacaacaaatattttttgttcgtgattcgtttagtctggggttgtaggatccttggttactgggggctggctgtatacagataatatacatatgaataatgagtctatatattatgaagttattggcacactggcttgtaagctcaattttctgcttactaatggattctgagtactcaaggcttcccacagagtgagtactatttgtcagtgccaacagagcctccaatggcccctcatgccccacacaaagagtattgtgggtattgaacccttctgctctggcgcgcttcccgagccatgaggggccgagcctgcaaacacagccccatgggatggcacaggctgagccaaaggatctgacagttccagataacggagtgcagagcaacactgtggccagtggccagcgagcagaagaatcagagctggaaagcagacagcaggccaaggccaggtctgccagcagagagtcggggcagctaggcggcctgctgtctggcctggctgttcagtcctcacccaagatccagcctgctgagccaggcttggaagggcagattcctcatccctccaccagggccaccaagagaacacagatcggagaagagtccggcctggagccagagtatccagaggggagaatattctcattatatcttacagttttatagtcggggtggaagaatgtaacaagagacccccactatgtattttttttttaaaaatacgtttcactgggggtcactgcctcaggactacaatacatagtctcttctgttactgtggtagccaggatatagaagtagccattcccatctgtcgccaggtcagaagagttacaaagtgctctcacatatattctctcttagcctgatgtttgaaatatctgcttggtactcctggctcctcattggtcactcagcctttagcgttcttttacagaggcctcttcatgttctctacgtcatcctgaatgtcccttgtgcataggacccatagacttaggattaatggttactcattttcttttgagaatacaaaaactggtcctatttacgtcttgcctgtcttatccgtgtcgtatgcccagaaaagtgctttcaactagagtgtgaatgtccccaactctccctgaagtcttctggataatttcttgaggaatttctagaaactatcatgactgccattgactgagcccattctattcactagtctatgtcaaaccttgacattcatgggtcacttaaatttcaggtagatgtccaggcatagcacaaattaaaataaaactaagtacaataaaataacaataaaaatggaaaagcaataatacaaaccaataataataataataataagttgtatggatttaagatgagaaacaaaacagttctcatgtaagtgtacataataattttcatactacagaatctgtattttgagtggtagtcttagcccagtgctgccctatgtaagtaacttctaggttcagttttatacacaaaggaactgaggcttcaaggggtcagaagcctttcccgtggtgctgctgttggacagcggctacctgacttcaaagtccctctatacctccggaatcacagaagtgcctttacctgttcagaggaggggtgatgggtgggagcaagaaaagactggtctacacgacagactgcattttctcgtgttttccttattgtgtctgaggaaagagaagggagtgcgcaatctgaactcctcacggaataaatgtcagatgcataagtctgcattctgtgcctagaaccgaccacccgagagtgggtgatttgtaaagaaatgcattgttatttggactcactgttctgaagtctgggaagtccagatgcatgacaccagaatctgtctgacttcccttgtggtttttgtgcagtttcaactcatgggaggactcagaagggtaagcaggcacaggcacaagaggacacaaaggggcaacctcatctaatgacagccccctcctgcactaactaccccagtcctgtgatgacaagcgttcactcccatgagagaatccgcactgctttcagaaggtgccgcccacaaacacttgtcccccaagactacaaacagaggatttgcactgcagtgtgagttttagtgaagctgtactgtgtttgaacctatgtagacagacagagtgaaaactgggttggcatttgttctgttaggtgccagagacacaccctgagggttaacagaagtttcttcctcaaaaatgtgaacatcatggggtctgtcccagtttcagctctgttacagtgctctgacagagaagcttaaggaaggatagaactacttctgggtcatccatgagggaagtcaggacaggaacttgaagcaaaaaccatggaggaatgccacttgttgtcaggagctcctctttaggtagccttcttatattgtcctcagtcaccatgaataccactcactgtgagctggcccctcctccatcacctcacagtgaaaacgagctcccatacttacacccacagacccatgtgattcggccagttcctcagtggaggctttcctccaagatgatctcaggctgctatgtcaacttgacaattaatgctaaaaagggcaggttcaaggttcaaccggcaaaataggagggatttgtaaagaaatggccttcaccgagtcaacttggaaacactagcatgccgacgtcacgttaaggctgccatgatccatagcttcctccagccttgtgcttactccacggtgctggttctaactgtcactctcctggatgcccacaggggctagactctgttcctggtgggattccaggacccagcacaagccaggggaggatatgcaatgggcctccagaccacgcagtctacagatttctcctccagagacagctagaggccttctctcctgcccttggaacctcactaggggtcttgagatgaaaaatgagaagtgtgtttgtgtgtacctgtgtgtgtacatgtgtatgtgctataaatgtttgatgtgatggatgtttggcccagggagtggtactattaggaggtatggccttgttggatgaagtgtatcaccatggtagtaggctttgagaccttcctcctagctgcctgaggagtcagtcttcttcttgtttgcctttggaacaagatgtagaactctcagctcttccagttccatgactgcctagatactgccatcctcctgccttgataataatggactgaaactcagaacctgtaagccagcctcaattaaatgctgtcccctataagagttgccaaggtcaggatgtcttcacatcaatgaaaccctgactaaggcacttgagtatatgtgtgtgcatgggtgcattggaagatcgaggttgacatcaggggtcttcctcattccccaccttattcattaaggaggggtctttcatgtgagcccagagctcccagatagaggtttgtctagctagctggcttactccagggatccctgtctttgccttctgaatgcaggagttagttacaggtcaccatgacatttgtgtgggttctgggaatcccaaccccggacctcatgcctccaacagcaaacacgtgatccactcaactgtctcgcagcccctgcagtgagcattcttatgggtggcttcaaggtctctgtgaaatggaacacagtgcagaaggacacgggtccaagtcttacaaataacactagagaaaccaaattgtcttcagtgaaagaaattgacacctgttcaccggaaggctcgagtggatgttatttaataacctgatgatcttttctgctctggggagcctcacctgaatcccctagactcctgactgttgtttctcggtcgatagaagccatccccatgaaagaggccccatgtactgtgcagaagaagttatgcttattccaaggctttaatgcaagtgttgcttctctgtcagcagagcccatccttagacttattgcaaacccttcctgcctaggccttatccgagcattgtttcacagtcaacagagcccactcttgaggaagagttcataggtgacagagttttcagtgtagccatgccttaagctttattgtgataattgtcaggaggaaactttcttccaaagttttactgtgtttaaatctgtaaaaaacaaaaaaaaacaaaacaaaacagcgcagggtcagactcgggaagtttgaaccagcctggctaaggaagctgtgctgaagagagtttcattcttgcctctccaaggatatttcactgctggctgtgactcttgaagggacctccacaatacagggagttggacaaagtggcctccaccctggtctgtggcagcagttacatagaccaggaagaccacagagaagactctgtctatccgggaccctatttgtgatgaccagccagggctgtctggacctcttggccgggcttcctaagcagtctcctagttccttcatttgttgccccaccctcacatcagggaacctggggctcccttttagcctccctacatctccctaaagtccagccagcaccactggttcttgtagggagcacccagcactccaggtcgcagagcagctagaccccatgaggacagcagctttgctctttgtcagcctgctggaggcccagagattccagtctcaccaggttcctttgtctagtctgtttgtcccagaggtacacagcaggcactcggatgatgtcatttaggacaaaccctttgcaggcaacaacagcgtttaaagcctgagaagaaacaccccctcccctctgtcctcccctccccctctgttcttccctcccaactcttcctttctgctttatctgcaccaaaattcactctcaaggaagacgttctgtcctaagaagaaacagttggatagcagtgtgaacaagaaataaaaattaaatgttaacaatccctgttagcatcctgtggctggctcagtgtccattgtcagtgatccgctgggttttttatgtaatttcttctctataacctgtcttttcgcaataacagcttcctctgccctgggacttccatgtccaccctattggctgcacagaaggctttgccctgagcaagttcttcctgctcataccatcttgtggggaggcttcctgtgtctaattagacaattccaaggtttgggaacttcgtctgcaccagggcctttaatttcatgtaaattcggtagatacaagtatgagatacgagcactttcagtcctgaaagaatgtgagcaccatacagtggtttccatttcctctcatctgattcatttcaggggattctctgggtgacccaggaactcagtcatctcaaacttcctgccctgcccttccctggggaaggagggggaaaggagccaagcctagaaagtctacagcctgctgggaagcttgccctctgaccctagaaaagccagaaagaccggtttccagggtgcagcggaggctggtaactttaccctgaggctgcttttcctcctgggaacttcctgctgcatactaccctctggcctctctgagacccccatgctcagcacccgccctcccttcaggtacctttctccctgtttgtgtgctatccagggagagcagcttctgttgtcggtggtccagtcgcagcatccacctagttgggctgtgctcagcgtgtacttcaggctgtcttgccaagagccagttgtccttcttcgtgtcttcaggctcaatttattacttcagagaaagagacttatacctggaagccataccacccgcttgggcaaattcaaccaactttgtttttctttttttaaataaagaaaaatgtattgaggctgtcccacgtgtactgtgcaccagtctgatttgccttgagaagtggaggtcaggtggagagaacaaatgataaagcgctgataaagtgctggcatttaccacagtggaagttgttttgcactaggagagctcatctgagtggaagtcttcaccttttcaaatacctgagtagaaattgtaggcagggagtggcactcaaagtcaatatctccctcctttaggatattcaaaagtttggatgacaaaaaaacaaaaacaaaattccaacaaaacaaaacaaaaccaaccaaacaaccacaacaacaacaaaaacaaaacaaacttgggtgtgacttcagcacttagctattaggaaagaggcctccaatgtgcaggacttggtgatgtgttagaatggccggtggtgccacaacagcaccaaagcagttccaggtggaagaggttgtattggaagggagagacaaagaagaggcaaagagagaaaagggggagaaaggagaaaaaagagagagagtgaggaaggggcattctccttatttatatggaaaatgatgtaacacaagtaagggtgggaggtgagccaagtgaatgctgggaatatggtggtcattgtcttggcaaccggtctgtaggtcacaggtcgtgctgttgcctcataggtttggaatgtcctgatgccaacacttggtctgggatcagaagttggaccagaagaattatggcttgaacatggtgtagacagctagaagctcctgttgaggggatggtctcctgctggtggagtctatcattgaaagtcactggatcacaaactcctgatataatccatgacgtaacccactgacggatccataactccaagatattgttatttggaggtggtgcaaatggtctggggtggggctcaggaagtatgtcagagtaggcgtggtctggaaagataacccttgcccctgatccttcactgtctctctctttgtttcctagccaccatgaagctagcaagggttggactgacagtttttttggtgggctgtcattattattttacatttctgaatggtttagctcatttgagatataaaacctcaactggatgtttatgggctatctaatatgagtgctgtcttatgggccatctaatatgtatgctgtcattatggcctggtggacggtgaggagtggggtttcagtgaaacaaaatcattttccttctccaacatgtctataaatccaccaacaggacaatccatggaaaagtgaagccattctcaaatgatgtgcaaaggagtgtgcccagctgtgggggcaatcgtgtccatgaggccatttgctctgattgctttcacctggtgtctttgaggtctatccgtgctgttgcaggcatatttaagggacatttggttgcttccacatggtagctttgtgaagaatgttgtcatcagtaagtataaacaagttccagtagcgtgtatattttcagtggccttggatcaactgatacctagaaggagaatggcagggtcatgtaataatgctacagttccaatctttgatttctatgatcttagaccattagatttctaagcaaggcaactgaactttgttgcattccaataatggacaaagataacaattcctctacatttatttcaactcttattattatcgtacatcttttctgtcgtagtcgtatgtatgtgcagtggacctcactgtgttccttactcgcctctccctaatggcaagtcatgttgagtatcttctcctgagctttggagcctttcaaaagcttgttactttgtggatcttcccaaggagacagagtcataggctgtaaacagaatccctggaattacccgtgcagagggcagttcatgaagtgcaggaaggtcccttaaagccaagaagtgctggccaaagcctgctctgccatgcaaagtgagtttggtgaacattttcagggaattatttttgctgtaaataaggaaacctcagtctctactgcttcccatggaatttgatcctgagtgatctgaggtaaaatagaaaatgagagaaaaattaacctccttaaattatgaaaattctgttgtttcaggggaagacacaaggaagctgggcatgatggccaagtgttagagggttacactactgccttctgcttctgatctgattgagtcacagctgagatgtggcaccaggactcttggctacactcagttctctcagtttgactgagtactctgggatcacagaagtgactacatgatggtaagagtggggctgaggaatactccagtccagcatttttccaccccatgtatgaatgagggctgtagagacctaggctttgtaagttggcctcgcttgtcaacttgattggatctgggatcaactaagagacatgcctatgggtgggtttgcaggaatatttcctggaaggattaacagaaggagaaaaacctcccttctcctcaacacacacacacacatacacactggacagccccttccttccagcagcagcccagaggtctgaactcaaagcttctgcctgcctaccttatctcactgctggcaaatgcatcccctctgctccacccatccctgacattggaacaccggagtccaggttctttggactgaaaacccacagctctccaggaatcctctaagccttcagcgccatgttgggactgttaaggcacccagcttcatgaacagtgaggttatgggattctagcacgcagttggccattgttggactacccacacagaattgtgtgagccaatctgataaattgatagatccctcccccgggtgcgtgtgttctactggttctgtttctctagagaccttgattagtatataagccaaataccagagtacataccagagtctcccaagtgtcagctaaacatagacatctgtaacctcaatcattgctctagtgacttctttggagcatcctccctctgtggacattttccaactggacattgaggctggcttccattgagcttaccacgacctccctgacccaagcccttgcagactggaccattctctgacctcttgggtgtctttcctcaccctgcagcatgctaatggtccccaatggtcttcctgaagctgactctttggatttagcaccccctttatcccactggttaccagccccacaaggcagtcatggcctcccagttgtactctgtaagaagcctttcaaaatttgtcctcagcacaaatcgaatacatcccctcctcctccatcccgccatgatacagggttatgttttcaatggagagatgggcatgaaaggggatctttcaggtttgaattgtgacttggttcacataaatcactgcccactccactcttatagtctctgtgtggaatcaaagattcaaacttctccatgcatctcagtgccctttttaatatctctaggtctctccaaggaattagcataactgggcctgctaggtgactcaagccaccctttctgactcattccttaagccagattcacaggatggcttctcattgttgtcaaggtgaagaaggtctcaatcctcccactgcctaagtgggcaaggtccccaggatgggggagagagatttggaggaaggctgggaacttcttaaggcctgcattgcttatctaaagctaattaaaaagctctattgtttcctttaattgtgtgtgtgtgtgtgtgtgtgtgtgtgtgtgtgtgtgtgtgtgtaaatgaaaggctgaaaattgacagccctacattttcatggtcactttctttctttctttctttctttctttctttctttctttctttctttctttctttctttctttctttctttctttctctcaagtatttatttattttatttatatgagtaaactgttgctctcctcagacacaccagaagagggcattgggtcccattacagattgttgtgagccaccatgtggtttctgggaattgaactcagggcctctggaaaagcatttagtgctcttaaccactgatccatctctctagcccccagtcaatttctttttgacaaagttttcaagaaaatctggtgtagaaaatagtcttcaacagctgatgctggaggaagctggacagcttcagttaacaaactggcaagccctcagtccttactttataccatgggagaaaaatgaatgcaaaacagatcgtgggtataaatgaaaagagccaaaatctaagactcctagagaaaatataaaagaaaattttagtgaccttgagtttggcactgcattgttaattttttttaatagctaacacttaaatggttaaagaaaacctcttggtgtggggagatggttcagttggtaacctgtttgctgtgcaagcctgagaacatgagttcaatccctgcacttgggttttaaaaaaagaaatctgtgaatggaggcatgtgctgataatcccacgactcagaagcctggcacaggtggatccctggctctcgatggctggccaccctccccgtcagtaagcccaggtcccaataagacctactctctcccaaaaatcaaggtaaaccatgaccgaggaataccactcacggttgacctctgccctctacatgcatgaccacgcacatgtacatgcatctgcacaaacacatgcacctacccacacatgaacctgcacacatataaaaatgcacatccatgctggaaataaccccggactggtgggcttcattacaacaaaagatgcctaggagaatggaaaagaaagcctcagagatgagagaaaatatttacaaagcatcgtctacaaccaagggctggtacccagaactaatggaaagaaaacaaacagaatagacatctccctgaagagtgtcttgagccggcgaaaaagcatatggaagaagacctaccgttgttagtcactaggcaactgctgtaacaatcacgacacagctccactgcacgagaatgaggagatctgcaaaaatctgttagctgcggggattcccattcccagctgctgggaatggaaattggtgtgatcactttaaagagcattttgtcacctttaaaaaattaaagccagctagatggctccgtagctggaggtgcctgctaccaggcctgtcaacctgagatctgtctccaggccccacacagtagaaggacagaatcaacctgagaagttattccctcccttccaaaggcatgtgtggcaccctgtacacacactaaataaatgagagtgaattttaagagcttaaaagatatctagcaagtgcctttgtcttctaagcttagctatttccatcccgtcaatgaaatgaaatcacatcttacacggaattgtactcaagtgcccacaattgcttaggttgtactatcaagagctcaaaaccacccgaacgcaacccagccaatggatggattagcaaattgccacttggtcacacagaagccattatggaaagcagggtggcgtgactaaacctcagagataattacgatgagttaaagtggagtatgcaagttctgtctttagttacagaaaagcatagttagcttacagccagagaacaggctgtggtaaccaggcacaagggaacttggggtgattggtacgtttactttattttacttgatttttgtggcaaggtctcaccatgtagctttggctatcttggaacttactatgtagcccaggctggccttgaattcatagagatccaccagccaaggctgagattaaaagcacacaccatcacatccagcccagagttcacatctagcctggtgtttatttatttattttttggtgtttatttttttaattgtgacaatatttcgagatgtataaataggtcaagtttctcaaatatagacttctgttctgcacaacttctgatgttccaattattcattaactgagttattaggaaacagtcctttattttaactatccaaaaactgaaatttgtttcaagataatgcagtgcaggataaatgcagttgtgatacagatagagagatgtgttatgcggaagccgacatgtgcttggaatgctatatttgaaatgtcagtatgactaggcataggcaatgcacacctgatagcctagcacttgggaggctaagacaggaagttggccagtgtttggccaatttgtgctttgcagcacgtttaaggtcatctgagctacacaggctcaaaaataaaacaaagtaaatgcaccacacacacacatgtacatgcacacacaaacaggagcacacacagacacatgcacacacatgcctcaaacaaaacagaaaacaaaaggcaacaccagcagaaaatgtgtctttaactctaagtatctggcacacaactgctatgtttcttcctttggagataagataagaggcctggtcaccttggtcactttcgaagctttgatttagttctataaaaatacttccaggagttagagaccacatgaatcggttaaagttgatgtgcagcggaatcagttaataatttatcaatgcaagtcttctggcaggctagatttttctcaaagaagggaccgatggcaggggcgggaaggagaccttcaggaggagagtgggagatgagccctgaggctgccctggagccgtgctttgtagatcggcaaagcatgtgtgcatcaaagaaacagagtaattgtgacatgtgagcagggagttaaaggtgaacccgaagtcctcctcagcacacagtgcccccgctgtatcccatccccactcctgaggcagcaacactacagcggaaaattccacgacttctcagggccaggagccagtccctctaaagagcgcccattcataagctttttgagtgtctgctgaattcccccatattagatccttagagcaatttacaacttgtttagatttgataactaacaacttgcagggtttggtgagcggtcatgaatgtaggaggttacagcaaatgcatggtggaagtggccaaggaaggcggggcggggcagggtggtggtggcatttgactggctagttaaacctacctgtttgcagggaccatcttgttgagagggttttgatgtgttccttcctggtgtccttttagttttatatatggcatgttggaaaagaggaggaaactcagcggcatttgcaaaaatggtgtggtagagatcatgaaaaaccttttttctacaaaatgatgagaaagataactaagacaactagtttcaacctttcgagaactccagagattggccaaaggcttccagccagccagcaacaatttagatagaatgacaggatttcactaaaagtagtgagctttctagcacacaacttgctttgttgctctctctctctctctctctctctctctctctctctctctctctctctctctctctctctctctctctctggttctgtctgagccttgcaaagtcaaaagtccctaggagaaactaggcctgacggctctccgaaagcaccacttgcaagcctgtctttatttaatctaacaaaatttcctcggggctaaaagctgtttcctgtagggcatttgttaaaaacactcagtgggaattgttggacgtcatagatggtggaggcagaggatgacagttggagcaataataaactaagcatatgcttaatctaaaggctagcaggcaggatctaaaggccacgaagccctgagaactccggcatgtatcgtctggggaatatagaaatctgtgagcacaaggaagaaaagccctgggtatcaacagagcagtgtgcatgctcaaaaaagaccccagagctcctcacatgccccagatctcagaagcaactcagcagttcatttgttctagaaccttaagaaaacctccatctaattattagatggcctctaaattgactcaagtaggaattcagtgggggctttatcagaagagctgggctgagaggttggagaggctgagaagtctctcagtcagcttgtttggagaagtggtggggcaacgcacaactccaaatctgaaggcttcagaaatgtggaagctgagggcacaccactcacccaaggctaagtgccaggaagtgggagaggcacctagtacaagtcccagcgtccaaaggcctgagttccagaggacagagaaagagagataccttcagttccatatggttcctctgctagttggatagtgttggatagtgtacattcccacgaactgaaggtgactttgacacagttcactgatgcaatgccagtcttctctgtggacagtctcacacacattcagaatagtgcctggccggatatgcagatatcctttaatttggccagttgacatctaatactaactgccacagatattaattgaaattcttcaaggaaactgctaagataataatttgaaaattagcacaatatatgctaagcattcaaaatggaatattaaaaatgactatttaatacaaaacatgcaacaagggggaatagaaggacaaaaagcttaagatgtataaaaagaaatgtcaaaatagcagatgtaaattctaccctgtgaatagttacagtaaacttaaatgtcttaaattttcaatgaaaagagttaaaaagaaagaatgtacgaaaactatgatagcagccacaaagggtgcaattaggttgaaagtaaagtagaaaatttcaggtctaccatgaaaacaaaaacaaaaagaggaaggtggctacactactgttagacaaaagtgttatcagagacaaaaaagagaacaattcagaacgagaatcaccgtgggtcagtccatgaagaagccaaaccagctgtgaaactgtacacctcacacagagccccaaaacactaaggtgaaagtcaccagaaacagaaatcatcatccaaaagcaataactggaccctgtaacatcccaatgtttgacaacagaacagattgcatgcagaacattggtgaaatggaatacttagacaacgtgtagacaacactctcaaccaaatgacctagcggacacccataagaaagttccactgcacaccaaagtcatctttgcacaagaggctccaggataggcatatgtgaggccatgaaaatggtccccagagatcgaaaggactgatgtcatcagccacagtggtgtgagtgaagaaatcacatagaaagtaaacagagactttcccagaactgaaatgtaaaagcactctgagagatcatgcaggaaagtttgagcatggtttatgataaatgaaaggaccacaagacggaactacaagacatagcaaaagcattgcttgcatatcaatgttcatgaacatggacattaaaacaacaacaacaacaaaaggagcttaaaaatcaataattcatcttccatcctaaggaactggaaaagaaaaagagaaaaaaatctaactaaagcaagcagaagaaaaaaatgataaagatcagagtagaaacgaataaaagaggataggaaaaaaaaacctgaaagccagacaagaacacaaagctttcaaaatgtagcttacttggctgcactaactagggagaaaaagagcaatctctttactgaaacgatggaagcaagaacaatctcaggctttcaaaaagaaataaccatgaagaaatactataacctcgtctccgctaacatgccggtagcatggaggaagtggaattgtttcgagaaagacttagactaacaaaactaactccggaaaatacgggtgtgcaacaaaaagtgaagagattaaattagaacttttatcaaccaacaattccaagcagggcacagaattctatacctgaggtctgagcaatgtgaaggctgaggcaggaggatcaggagttcaaggtcagccacagcctggtgaacttgaggtgagcctgggttatacaagacccagccttaacccttcttttccccctaaaaaaaaattaccacaggaaaaaccccaaactagatgatttcagtggcaaattatacaaaggttttaaaagaataattaacacaaacccttaagacactctttcaaaatgtagcttacgtgggaacactttcttagtcattctaggaggcaagtattatcctgggggaggggagaaaggggaggtgcaggaatcgtggaatccaggaataaaaagaattatgcaccaattctgtgtaatctgtacatagaaaaatactcacagaccagctatctagaatatttttaaaaagtattacaacttaataactctgaaacttcaaaaatgaatgagacacccagatagaagttcctctacagcagatattcaaatagccaataccacattcttactcatcagataaatgctcatcaaaaccacaagcgaaatgctgcctcacgcccacaaggatgattaaaataaaaagacagacaataatagcaagtgtcggtgaagacgtatagaaataatatctcttagcacactgctaggaggaatgtcaaattagtttactttggaaaatcattagacattgtgtctgtgtgttacacatttgagtcaccatgccatggcacccagtattcccttcctgttgggataccgaagagaattcaaaacacgtccacacagaaatgtgtgcacagatgtgtacagcatcattatttaattaatcagataaagagatctactggtctgctttggaggcagaacacacacctgatgacactgttcagcaacactctctgtgggctttgtggagcctggaatgtgtgatgctagtctagcacagggatagcacagctcatcggagttagtcaagtccaagtactacggttgcctggtgcacactttagagtaagcctgccgtcttgctcatcccaaaacctcacataacagtctcagcctttgctttgtctgctaggaaagccacattacaaaaaccctgacaaggtagccttagtgagtccgcctctcttctacaaactcttgatgcttttcttgatgttggtacaccacatgaagggttcccagatgtcttgtcctttaattatgaagttagcaggatgtacactctgaacggttctcagtggcgtctccagccatttccagtgacagtccctctaaacctagacgctatgagttgccagtattatatgggcctagcaggcagcctgctcttcccacaaggaaacacccaagcacatctcacagcctgggtaggagttgtggaaaggaacagaatcagagttatggggtttttaaggccacagggacagacttcaccagtaagatgaatggcctgagtgaagtgatacggttgtgtacaaaagcatccttggaacagctgctgctcaagaaaggttggctgtatagtgagagggtgaagcaggatgagtgcttgcaacagaggcccatggactgtttggtagaaagtacaaaggccatctggccttggattagagtctgatgaggatctgggacaaccatcaccaaggaaagaaaccgacagcctggcagctgtagcaagggcctggctgaggccagagaatcccagtgtactgaactcctccaaaggaggagcatttctcagatatctaatgtcctcctccatgaaatgcaagtaggtctacttctgtctcccaagagactgcaataataagttctgagtactttttcttatatatgatgagccacccacccaccctccccccaaaacatggatagtgctggtggtggaattggtaaggatgttgatggcggtgatgatgattacggtgctggtggcagtgatgaggatgatgctaatgggagaggtcgggtaatggtggcattccgctgtgatgatgatgaagatggtagtgaagatgatggaggtgaagtttcagtgaggactttatgagactcttgtaggaccaccaaccctgcttcacaggtccaatgtttccagtgacatacttcagttcaagtagaagctagggctagacacccaggctgtgtgtagacagagaagggttctgtagaacacagaacagaaagccagaacttaatgggaatggagactccggaggaaaggtggaaaggatctcagaggagaaatacatttgaaaaggagaaaaatattcagtgagaggtccctcccccacccctttggagcatgtggcattacccttggtgtccatatgccgtctgtaaagtcttttgcttcccctaaaagttttggagaaatagactcttttttggttatcttgaacagagcatatgacagggcttagaggtcagagacaagatggagcctgtgaggttctcgagtctgcctggaaacaaccttagttttttacatgtatgctaagtatctgaacaaaagtcctcttgcttcttcagcttgtttgttatcttgtgcctttgttggtcctgttctgctatacattttagtgtgtatgcctctgtcatattggtatataacagagcatggtgttactaggaaacctactctcagcctgtcataccccacctcttctctgctgcttcatccaagctggtccagatgatgtcatgaaagaaggcaagggatgagcagatgatgttttgtggagaacacctactgggattcctcatcctgcctgtgctgatcccgcatggcccctcatgaaacctcttcctgtgtgccaaccacaggaccttggaaggagtcttccctggggttcctgagccccttcaggccttctgggaaggtttgtttcctcccacaaggagttggaagaacatcgtgaaaagcgtcttgagtttgacatagctcagagagagagcagaggatacaagcctttgagcatggcctcaagtagctagagaaagacacaccaatggaaaagactgccatccctgacagagtcattcttccacagtagctactgacagggtcaggaaaaagctatgctgaaacttgaacccttgtacatgggcactggcttctgaaatctcctagcatgttcataacgatgacccaaacccattgagcagtcatccttgtatccttcagtcttaatcgcatccccacaaaggttaggcaggggtgtaggggtgagagggtgggggtgtagggtcaagggatgagggtcaggggtggggcactacggtcggggatgaggggttgagtcctactgtggtactgttgggagatggtagcaacttccaggggcaaagttttgcttcctgttagtctcagtgtcacagaaggtgtgctcttgaaggacgaagtgtgacctcagtccacccctctttctatcttttcctttctggccacttggttgtgccacctgctgcccatcactgcgtctgcccctcccaccagagacctaaaggcaatgaatctgcctgactcctgactgtaaccactaaaccatgagtcaaaaccatccttctctctttataagttgatcatctaaggcaccggttacagtagcggaatgctagggaactcattcctattgctgcgtcaaagaatactccgacccgtcctgttgttgagctggcgtggcgggtgggtgaggcttttggtgaacatatgttttcatttcatgtgggaaaatccctaggagggccactctgggtcacagggcagggtttatggattgtcttagcagttgccacatccttactaatatttagtcatgctggtgatgttaatttttggtaggagtattgtggtatctcatttgtggttttaatttttatttcctggtgagtactggtgagtgtctttgcagtccctggtggtcatttgcatgtctttttgttgttgtttttgtgtgtgtgtgtgtgtgtgtgtgtgtgtgtgtgtggtatacaaattctctcatccagctatttacctatttatttaattgctcacatattcgcatgaggctgaagttgaacccttggctttgcacagtctgggcaggtgctattaccactgaattgtatccacagctctctgggtcctttccttatataatctcacatgtcttaagccaaccttgaactcacttctctcttggtttataattgtgcactaccctatcaggttctttcacccatttttagttgaattgattatctttcattagtgagttgaaagagttcttggtatacccagcatatctgttcatttttagatttgtgaatattttctcccaatcggtggcttgcttgtttgtttgcttactgatgtctttttaagatgtagttatttatttttaaagtgtgtgagtattggcctgtatgtatgttcatatatcatgtttgtgcctagaacctgaggtagccaggtgagggcactgggtgccctagaaatggagtgacagattgttgtaagctgccatgtgggctctgggaaccaaacctgggttctgtgggaagcagccagtgctgttaaaagggctgaacgtcgtctctccagctctcttgctgagatcccttaccagcagaagctttcggctttgttggagacagatgtctcggccatccttggtgattagctcttcctgtgactcccccaacatttgcttataccccaaactacgaaaatgttctcttacgcttttctctaaatatgttatggcttttgtccctgggtctgtggttcatttcaagttaatttttgcaaatgaggaagagagagagagagagagagaaagataagtgtcttgtttgtcttcaaataaacacccaatgaaggcagcgccattttttttttttagaagacttttccttccccataaatcgttttgacttcttggacaaacgcagatgtccctgtaagtgtgaagtcgtccctggctcttggctcttttctgttggttatctgtcagtccttggccagccaacatcacacacctgtttgcacgttaatctggctactccatcttctcacgtaatcacttttgtttgttaattttctgtattctctgtttttatgttatttggttccactcttattatttctttttcttctactcagtgtttccttcctccttacttcctctcgccttccctccctcccttccttctttttgttccgagtcttagagagggccattgaagcactgccttgaaacctaccttctttggtatatgaaattatgaatctccttcctaacactgtttttaccacagctcaacatcttgatgttttattcccacgatcattctgatcaaaagtccgttttccttgctgcttctgctttagctcaggattacttagaagtcctgtctgcctctaaacctcaccatcagtgacttctggtttaatgccctgtacccaacaaaaattcaatacaccagtactacctcttcaacttattgggacttattttatggactcacgtgtaatttatcttttaactggaaacatatggttttgtttttaattcatacatagtaattgctcgtattttggggtgcagagtaatatttcaattcatataaatgtttaatgctcacatgaggatatttggcatatttattttctctaacattccgtctttttctttgttatgaccattcagaaccctctctaggagcccttttgcaacatacagccaagtgtagcctactacgctgtagaacacaaggagttatcactcatgagcaactgtgccccttaaccatcacccttccccaaagtcttctctagtctgtcttctgcttttgtgagatcaacaatttcagatattatataagtgagaacatgtactaatggtttttcttcattttacatttacctaattgtatttgtgcacacgtgtgtgtcacagtgtgcatgtggaagtcagaagtcagctgtcaagagttagttgttttcttctaccatgtggattccagagatctaactcaggttgtcagacttggcggcaagcacccctgcttcccgagccagctcataggcccctgcatttgtccttctcacctatttcacgtaacacagtaccctcttgacaagagctccacagagcaagatgctctctaaatgccaacagggccaagacattggcgagtttatgcaaatgcagatgccaccactgatttgagacctagcccttctatcaataacagtgtgaacatcttaaaacaggattgtgccatttcctgatttttgagttgtgttgttttttgctttgtgtatgttgaagatagtttctcagtacctacaaaccagtgattgtcacttctcctggatgagctgatgcttatgacatgtctgcccctactccatctggaactcatctccatctgagagctccacagccccaccagcaaccttcttcctgttttcctaattctctctctctctctctctctctctctctctctctcgctctctcgctctctcgctctcgctctcttcctttttaacatttctgtcacacatcttacagagactcttctttctccacctgtacaatctccttttggactgaagttttgctgtcttgttttcccttcccttgcctagtaagtagcttgctctactgaggtagctggttcactattcacctgagttcttagcctctagtgtttgttcctctggtccttcttttctacctgctttgaaaattattttagcatattttaaaatcacttcttaatttatgtgttagccttttagccaacttttttgagctggttattgattacatagagactacgatgtatgtcttacacttcactaagttataattgtgttgttttatgcaaattacaaaaaacctcaggatccatagatccatttactccaataattttatgttaaaattttcatatgcactacacatataccccataatattcttcttctttaataacatatatttaaatttagaaagtctttgtttgtctagaacatcactgctcttgatggcaccactccctttcaacttgaagtccttaatttttttaaaaattatttttttgtgtaagagagttttgcccacatgtgtgcattcttcattgtgtctggactctggtgtttctgaaggttgttgttatcaaagtttgtgtcatctatttgggatttctctccaccaattgttcttccagttggcagtaacacttctgagaaccaaacccaggccctctgcaggagcagcgtgcttaaccactgagccatctcttcagcccctcagcctgtttttccaaactctgaaatgtcttgggagtcaccacgtgtctactctgatgatggagccttaaaagagaccagaacttctattctgccttctttaatctctagggatgcaggaaacacttggtttcattttctgcaggaggcctggggcatatgctcgagtgcattcacacacaaggaatcatttgcagtgtttgctgacaatgtgtaccacataattctctagataacaaacttagaatcagagaaatttagatatggtattactttgggcttgaaaggattgctggaaattgatttctagcccaggggttatttttgaaagatctttaatatttactggggatgacagtggtcatgacagtagggccatcaccagggcaccatcattgatgcatagcatgcatgccttcatgtcacctgtgttcttaacaacctatttaacagatgaagaaacataggcggtaagtaggtagggacctttcacagctaatggagccagggttctatctgagagtgttctttctttgttccaccattctaaaacactgatcctcaattacatggaagccctttcatcaaatagacctggaaagaatacgtggatgggctgatgatgtcacatcatacatgctatgctatgctatgctatgctatgctatgctatgctatgctatgctgtatggatgtggacctctttgaagtcttttaaacatcagaagtggagaagagaatgttctatacttgaggtcccatgttccagctccaatggcagacctgaaagataagtatattagctaaaagccttccagggagagatttctctacttctctgccccctactgtctagatcttagatgcaggatggggtctccatcctcagagcccagctgtggtccaaggggagaaatgagaagctaagaatagggtttgagctgtgctccaagagtaaggttttaacagttagtatgtttgcttggagtgttcagccacttgtcatcaaaagacacattggttcgcaaagcccatcaggaatgctgttttgttttgttttgttttttttgttttttttttcctggaagcttcaaagtctagttcccttcagataagaagaccacaataaacacagtccccaaagagctagctcatttcttggtaaagcagttgctagtgatttctcagggcacacaaatagctggaccataaagaaaacagtaaaccattcgcagaatagagaagtgtattctcaaaaatgacaccaggccagggctgtggttcaacaaggggctttcacactgtctctgctgttctttcagttttagcctcagaaggattctctgctccagcagggctgcaacctcacggttagcaccgactctagtccccggcatggatagaaagataggacctaccttaaccagtctggaattccctcacaggagccctgctacaggagggaagtgtcactcattaaggcttccagaaaacttatgaagctattctttctgtacttcaaagagctatgcaccaagaactcaaggcttaggatggtcactgagccccagctcgatgctcaatacagaagacataggtgttgggactattgcagtgagctctagactgcgggatcaaccagaggagaaatgttcagatgttaccaggtccatccctgtcgccttcttgggtcaacactatatcatgtcagtactcttccccacaacactgacactattcactgcatgcctgactgtgtctgaggctcatagccagcctatttccagtaacttcaggtgggagctaacctcaaaagaaggaaccagaaataatgcctgaaatgtgttcagtaagatgttgcttcttctcccttgggctcctgggcacacagacttgcccacatccgagggaagctggatctgggggaactatgagatgtgatttgaggtgactcttacttccctgaccagatgtgccaatagtgatggcttctttggggaagccaggttggctgaattgctttattttgaaaataagaaagcagtgcatttctctcatccagagtcctgtttccccttccagtgggaactccagaactaagagagaagagaaagccacttttcagggggaatttcaccagccacaagtctttgaactcatggggagcaagcagagagagaagggaaagaaatataggtttgccaatatgtgctgctaggtactgggggcatagccactcggacatcctaccctctcctcttcctctgcatgctggtttcacagtttttttctggtacctatctcacatcccatctcaaagccaggtagtcacaaccctgtcagcaagtcacctttacattttatcccacaatctgcccaatacccaccccagagccacaggatgtgattacagagccacttcagggcagctgatgacaagggaagtgctcatattgaagcctggtacatcgaagactctgccaacagttggctcagctcaccttgtatctaatggtcttcgtacagggtggcaacagctttctgcaggttccagagagcatgggatgggtctaatgagacatcttgggagctttgcatttgtagattagaggtacgtcatatgtactgattttaagataattgtatacatgactttcttcatgagaaaatatgtaagtagaagtttggccaagtattaggaatatatagagaaaaattagatatttatttagctcatactagagatttacaaacagattttaaatgctgtgcaggtttggagcgctaaggcaatggctctgttagtgaagtgcttcctgggaagccttggcgagccagttcaatccccaaacccagataaactatacgtggtggcacatacctgctatctcagcgctggggaagtggagactggaggattcctaggatttgttggctagcccacagcctctcccactgggcaagctccaggccagtataagatcctatgttacccctcgatgaagaggtacaagcaactaataactgcagaaaggggaagacactctgcctcctggtaggttgtccaatggtcagccctaaaaacatacacacaagtaacacgaaatagattcagtaggtttcatttgtgtgtgtgtgtgtatgtgtatgagtgtatgtatgtgtgtatgtatctgtgtgtgtgtctgtgtgcatgtgttataattataaggaaaaggaagctgggaattcgtgagggagtggagagaactacaggagggcttgaagggaggagaaggacggaatgatacaaatacagaacacatatatgaaagtaaacgacaaaacaaaaccatcacccacacggtggatagtactgagtagagacacaccaaaagtctttctcttactttataggtacaggtgttcatgtgccatgcacgctcatacacaaatgtgtacctgaacgcacacacagacacacaataaaataaaacaagagtgtctaaaccatgaatcttgtcactcgcgttctttgaaagctcagtgtctttgtcaccatgatgttcctctggatatttgttatagtttattcacaaatacctcatggtggctctggatgaataatttcagatgcagggaccctgcctgggggatgtagcccaggaaaggcaggccacacatagctactggcgaagcacttgattaaacacatcctgcatgggtctctatggtgtgaatttgttaccctcactgtatcttcaagaagccagatgatcatgaccaaccttgaaatcgcctatgtggtcctgtttctttgtctcctatgggtgaccctttcagcatctttaaaaaaatcaaaatcaaagcgcgctggtttaggatactgaagccagtggttcttcccaagatagaactttgtggttcaaaataagttgttcagacaccttgagctaatagtgccttgtaacatgagacgctgggtgaggatttgactcttaacaggcctgccttcgctttggcagcaggaacttaaagcaaaaacaaaccttgccttaggctgggggggagcagataatgtactgatatgcttacagtggggggggcagataatgtactgatatgcttacagtgtgtgttgggggggaacagataatgtactgatatgcttacagtgtggggggggcagataatgtactgatatgcttacagtgtgtgttggggggggaacagataatgtactgatatgcttacagtgtgtgttaggggggcagataatgtactgatatgcttacagtatgtgtggggggcagataatgtactgatatgcttacagtatgtggggggtgcagataatgtactgatatgcttacagtgtgtgtgtggggagagcagataatgtactgatatgcttacagtgtgtgtgtggggggggagcagataatgtactgatatgcttacagtgacatccagtcagagacttagtgagcctgggcctccaaaaccagatgcccaggcaggcctgtgcaccaggactttacctgcttcttactccaggcagggactctgcaggctgagggggtaggtagctagttgccccaaatctgaaaagctgtggaccacatggctgagtttcaaccccaggtctcctgactcaaaaccaattctcaggacttgcccttccccctaaatatatgtgccccaaattgtcaccagatctcagggaagcactagctctgtctggaataaacaccagcctcacggcaaccccgtcattaccagatcgctgattctcgtctgggtcttgtggcttcttgggtttttctctggtgtttcgctcccaagtcttccccccttccctctgattatgcatatgtaaacagtcagcgtggtggcccacaggctgcaatctctgttgctcatcaggtgcagtcagtttagcctcaggcctctgccagaggccattcccagctcttcccactgcctgtggctctgtcctctttctttctgccacagcacctatagaaagatctctcagagggtcctgagggaggagacttgaggttcttcccttgggcaaacaagggctgggtggatgacataatcccttttaaatcttagaaaaacagccctgtggctcttggctctcttgggctctcatttgggttgcctcacgacactgggcaggaggccagggaacccaaacccaagcccagagactccagctctccagggagttctagcctgggctgtctggtgtggcctgttcctttcacacaaaagccagtgagtccacacaatctcaccctgagattggttgaggctctccccccatggcccacaagcctgaaattgcttgatctcatattgatgtccacttctcctcatttgtttttgatacacagcttgacttgaccctctgacaccagagaacttatagatcttgctctggcctcaagggaggagaaaaacctcaaaatcgatcaggactggagtagataacactccactgtgcctatcagtgggattctactgagccaccaggagtacacacaagggtaagatcaatctaagagacagtgagcattgtattagttacttactggtacccaaatacctgagacaatgtctatgaggaaagatttattttggttcacagtttcagagggtctcagtacaacacgataagtgaggcatggtgagaacaattggcaaagaaggtgttcatagtgcagtgggtcaagagagaggaggagggagggaggaagggcataggacaggagtggagagggcaggaggaagatgagagaaagagctggaggagggaggaagagaatgaagaaaccagagtgtggcattttgcaagaaaatggccctcactggctcataaggagtggcattattaggaggtgtggctttgttggaggaagtctgtctcagtcagttcctgttgcctgctgacccagatgtagaactctcatctactcctacatcatgcctgcctccatatcaccatacttcttgacataaggataacggactgaacctctgaactatactcagccccaatgaaacgttttcctttgtaagacttgccatggtcatggtgtccctcacagcaataaaaccctaactacagcacaaggcctgggacataagcttcaaaaaacctgcccccagccagttagttcccacttcttgaaagttccagcaccccccaaaatagcaccactagctggggacaggtgttccacaccatgggagacagtttgtgttcacaccataatgatcatctgtgcaaacttcaagaaccggtaagaataacctgtactgataggagtcagagcagtgatgagcatagaacccaggagggtggtagggtcagcacagaagtgttctgaagctcctgtgcccaatggggtaacatgcaggcataggtgtgcatgtgaaaaatacacccagctcttgaaagtcctgcagtacactgtgtgagcgctacagcttgataaagacttagaaactgcacaaaggtcaggaagagtcaatggaggagaactgaggttcagagagaagaagaggtgtgatcaaaggaagccaggagagcatttcagctgtggggctataggacctcgaagattccatgggaagattatttggggcagggagatctgtgagagaacctcaagctcttagggtaaatacggcagggtctggcagggaaaggaacatggtttggagactggaaagagtcctcctcaagaggctgagtcccaaggggcagcagcacagggtgggagtgtcattcctgtgggaagatttgagaccccggagagctgcctagattggttgtttctggagatgtcaatatgttttcagtaagagatcaatattgaaagtgagatagctctagagcaagaatcagctacctgggaaatcccagtttggtcatttgccagttgtgtttgggaacccaagagataatttagagaaagggagggaacgggagttggtccaggctgggaattgtgggaaaacacaggtttctcgaagaaagagtgagcccagtggtagaaaatgtgtttctagaatcacagtcctggaaaaagagtataaaaagtaggtggcaggaatatgtgcaataatcagtggctttaaatgttgtaaacgtggtgaaagacacccggaaaaacccacaagaagtcagctcagaattgcctttacctatatttacatatacccaactttcaaaactgtaaggcaaaggctttgccttagaaacaacaatgggcgagaacttgagacttatagaatcaccatgtaaagaccagtcatgttctcatagggaactaggctatctgggaacaatgaaactgttttatttatatatatataagtttttgatggaactagagagatgattttgcagttagaagcacttgctgcccctgaacaggacccaggctcagttccaccaccctacatggtgcttataaacatctgtagctccaactcttggagatcttgatggcttcctctagcctccttgggcacctggtacacacatgatgcacacatgaagataaaacactcatacacatatcataagtaaataagaatatcaattatagtttgagacagatataacttgtaaagataacacctcaagttccctcccccagttgcctatcagatacacctaaaccagagtatggagtattgatagtctgtgtgtgtgcatgcatgtgtgtgactggtatggagtattgataggtccatgtgtaagcatgcatgtgtgtgaatgtgagtgctctcagatgcatttacgcatgtgttggtggccgtggggtcactcatgttacccctttatagtcatacccacttctcctctagtctctagcccttgcaaatcattgtgctcctatatctatatgtaatgttaaaattttttggaaatggaatggtatgatatgtgaccctttgaaactgactctctttgcttactagaatgccctgtagacacactttttgtacctgttagaacatggttccctttcattactgaatggtatttttttctggttagctgtgactgtcaacttgacacaacctagaatggcctgtcagcaattaagagcactgacatctctccgaaaggtcctgagttcaaatcctaacaaccacatggtggctcacaaccattcataatgacatctgatacctttttctgttatgtctgaagacagctacagtgtactcgtatatataaaataaataaataaatcttaaaacaagagagactcaccattaagaaattgcctagatcagattggactgtggtatgtgggagatacttgggactgctaattgatgccaatccctaggcaaatggtcctgagctacataggaaaactaacagagagtaaacctgttgctagccaacaagcagcatcttcacaattcctactacatttcttcagctgtgacataagcttggctgaaggtatttctgtgtggaagaacaagaaggcttatcttcaagctcctgccttgccttcttttactgatgggctgggatctgcagttgtaagctgaaagaacccctttttacctgtacattgtcttttgtcaggattctttgtcacaccagaaaaataaaggcagagcaatattccatggtgtggctataccacagttgtctaatcatctcactgtggtagaacactgtgggtacttctagatttcagttattacatataaaatgtctatcctacgtaagtttttgtgtgcttacgtttccatttttctggagtaaatgcccaaggataaaattgctaggccatgtgaaaggtatatttttagtgtgacaatctgaatgttcatgtctcctgccctcaaattcctatgttgaaacctaatcttttgtatgatgacatcagaagatgaggtcttggagagtgaaggtcaggaggcagaatgacaacagtcttatataaaaggctccgaagttgcctggcctcgtgtaccacaggaggacatggtgggaagatactatgtgcaagccatgaaatcctcaaatctgagaaccagatccccaaaattctagcaattagttctggctctcagaactatggaaatgaatgtcatttgtttaatccatccttcttggactatttggtcacaacatcctggaaagactaagactaaggctgacctggaactcactttgtagactaggctggtctcaaactagatatccacctgtctctgcctcccgagtgctaggatcaacggtgtaccctacccagatcagacactacgtttttaagaagccacccagctgtgctgtggagtgctgtgaggtctacgttcctgctggcagtatccgtatagttccttagcttctagctcagcaagtccttaaatttccatctccttgagaggtggtgcagagagacagctcatttcctctctttacatttttgccatacatacattctctttgatgaaatgtctttgcgtcttttgcacaatttttaattgggttgtttagttctccattgattcttcgctagtgagatatattagatcttagaaagacattcatcttaatctatgctttctcatcttcttaaagtcaaaaggtaaatgtttctaattttgtaaactcctgtttatcaatatttttttatatgttttatggagcatgtatttggtctcaagtttagcctagtcccaagccctggatattttcttgttatttctaaaataatacttttatagtcttacatcaatctgcgatccattttgagttcttcaaaaagaatgtgtgtatgtgtgtaatttagaagttgttatatctatttcaatctgtctgactttgtaaattagagattgttatgatgaatctttttgatacatctattctctctttctgtgtgtgtgtgtgtgtgtatgtatatgcgtgtgtgtgacatgtgtgttcacatctgtgccggtgcatacagaggccaacggaggatgtcaaaacgcctcctccccatccctgttttattgcctgagacagggtccttcgctgtgtttgggctaggctgatggccagcaagccccagcattcctcttcctttctcagccctccatactgcttgggtcacaggcaggagtggcctcactggttttgaatgaccttgccttgtttgtgatcataggaggaagagattaagctttttaccattaagtctgatattcactgtaagtttaatcaaacatacatatatttctcttttaaaaagcatttatttcatttaattatgtatatacagggtgtgtgtgtgtatgtgtgtgtgtatgtgtgtgtatgtgtgtgtgtgtgtgtgtgtgtgtatgtgtgtgtatgcacacaggaatccaggtacccacaggagccagaggttttggatcccttaaagctggagttacagtcagttggcagctgtgtgatgtgagcacttgagaagtagtatgtgctcctaaccgctgagctatctctccaaccctctttccgggtggggtagggggagagagagatgtggtggctggaggaaccttattatatctgcagcagggtcaggtgctgacataagcagttgctaggtctccgagagtaggccaagtggaattgcctgtatattaacagggctagcgttaggggtcctgggtttgaagcctaacatggagatccccacttctctgaagtgacagactgaaggtgaccacatcttacatggacagctgtgggggtgctgaggtgtcttgagaaaagtgagacactgggccccgaataatactgtgtttagggagggcctgggatagggagacgccagactctttaagacctgctgtcctgagaggcgcccaagcttaagcctgactgctatggaactcaaacatagagtttagcagaatgctgggttggtacctgatgtcaagacatccgccatacccacagggtgttctatccccggctagtcatacaggaggaagctcaggcaccgagataggaggctgccttgaggcttcacccttccaggtgctgcattagcattttaataggggctttctgagctgcatccccaggggtcacagtgccccaggctgcagcaaagcaggtgcttccagccgggagatccccagctagtatccctgcagagaggcttcctgctgcctctgggtagaagcgggtgtgggaaggaggagggcggcctcctaggaatgggagggagatagacgggcgctggggaaacggaaacaggttaattcgttctccttcctggatgaataaccatatctgcccagaaacggagtaggttcctggggtgtactgtgttaattgccagccaggcagggatgaggagggacaggacaagggatggggatactaggtgatggagagtggtttcgagcctcaccttcctttgtgagaagaatgtgatgggacagttatggcctcagggacagaatggtgccgagcaggcttttctccctgttcaaaccccaaagccacacctgaaacccagcattgtgctacctcacatgccttggggcccttgggattctcttcctggcctccttgcttatctctaagcagaccagttcctggactgtgaggagcgctcattatctccccgttgccaagggcactctccctccttcgcctgcttctagacattctgcctcccaacacttcccgtggttagtgcttgcttcctggccgtggaatcccagtcttaccgccgtatgcccacggcccctgtttacgctagtgcagctcaggctatagaaatggcgctggagagaatccctttccaagcccccgcccccaccctccccagtgcactcctccttagccccagcaccttcccagctccagagggcacttcctcttcgtttttcctctgtcctcagatgacctcacccttcccagcgaaaggtgctctctgcagcctccagcgctgtacaggcctccacataatctgcataactggcctcctctgatttcctgcaaaatctagattctaggtcacttctgtttcctaagcctccccagtgtgcagtcagtccctctcagaaaaggtgtgattctcagaaaagtttcctaaagccatgtttggaagtgactgtgttttaaaaacaaaagcaacccgggacactaaaaattacttttctgaagccaaatcctgcaggctagcaaatcccaacttctctgccctgcctgttttcaagatgcacaataacacgatcctagcaaatttctgttcaggagtctttcttttctctgacgaggccttagtatttatctagtagaaatatttcatttggggattctctaccctgtaacttttttaaaaaatcagttatttggcatgtggttcccatttctagagcggacttctcttccattgtcatatataaaggttctgacaattcacgaggcttttccaactttaacctctgctttgcagaaaagatagctttgtccagcgagggccatctaacacccgtctgtatccgctctgtgtttccctgagaggtttggcaggcagccaactcaacgttttttttttcctgcagtgttaattttcacatatttatgacaatttccccaatgacaaaaatcccaaagtgggagcagttgtccaatttagagccctgtctttcaaattacaattgacagaaaatgcagttgaggaaaacccagccactagtgcacacgtgcaagcgcacgcacatgggcacacacacacacacataatttcatgagctcaggaagtccatcactctctaaataaagaaacactcaaaagattgacatgggctgaaagatcaatagctgggtgactagtgagaatatgcctaagacagtgaaatgaaactgattgtaaggtagaaaaccacgcagggggaatctgaaggcttgtgggaaccagcgggcaaacatgatgatcattgttaaagtaattaacccaaacaacttttgggtaaattccagggagtcctcaccagggaaactgatccttcaacaagttggtttccagtaaattcttttcaagctgagtggcttcaggggaatgaatgatgattcattagttggcagactcacccatttctttaacttttccttgtttcctgggtctttccctatggagcaacaggtactagggttgctaagtccacaccttcctcctatagtcagatgggctggccctcatcacattcaagtggaaatggagactcagtctccccctgcttacctgctctctttcctattgtaactctgtggctattggacccagactctcgtccttaattaaagatgccttgtcctggactctggacctctcaactatgctatgatgtctcctagatgtccagagttcagcatgttcattactgaactctcttttgtgccctaaacgtgtacccactgtcaaagccacagaaccattttaaatcctcttttccccacgatcaccaaatgcaagctaaggagcagctcctctctgctgccacaagctgctccatcctcctacctggtagctcctgctaccatgtagccatgtggtccacagcttttcagatttggtgcttcttttgggtaagaccaccaccctcggcctacctgtttttaagctattcgaaacacagcttctaggcaggaagttctgtgctttcttccccaggagttttgtgctcagctagcaggatcctcatggtactatggccacagactggttatctgagagctcctggaagacaggccaaatctaacctggctccattggccccaagtctagtacaccgtgagcatttatttgtcaggagaccctgagctcatggcatcctagggttgatcttgacagtgggaagtggatctacaaagccccatgggaaaacacccaggggagatgcaatgtgaccagaccactttggaaggctaaggaaaaccatacagcagctccacttagctagattcactcccattcctttgcctcctcatgactatattctagagtgcaacctccctagcctgctgtgtttgaacagaatgaaggtgacacacatatgggcagattgtgtgtacaaattgagttctgctctgcctcaggctggaggctcattctgggtgctgggttctctcctcctgcctcatcacacttaaatcatagaaacgctagccctggcttagctaacctttgcagcactgagaagccaggcatgtgactcggtggtagttagaaaggtcacatggttaagagccttcttgggtcaagcctgcaggctgtgaggagcctcaatgctgagccactccttcaacagcagtgatctgtgtccaatgacatggtcctggctggtcagactcctttccagcccattgtctactgggtactccaggtataggtgatgtcaccaagagggcagccaagcaggaggtggcatctggtgcccaagtccagcccaacaggccaactcttgttggcaagagagatacatggctaattgaccataacaggaccaagcccttgccaagttctctctgagaaaggagaaaactatttgaaaataaaattaagcagcttctgtaaagcccagcatgcccagcataaatgcttagtgaggatgaactggcaaccgtctacgaacgataacttttgggccagggagagggctcagtccataaagaacttgcctgtaaagcacaaggacctgagtgatgcacaggattcatgagaggggcaggcataggcttggagaggtaggctgtagataaagtgcttaccacagaagcgcgaagacaggagcgtcagtgcccagacctcttgcaaaagccacctctaatcccagaactcaggaggcactgctagctaccctagctggaactgtgagctccaggtgcagatgctgattcaataaataagatggagaacaatctagggagaaatctggtgtcaactctgggttttcccatgcacacagatacgtgtgcacacacatgcaaacatggatctttctctctgtctctctctgtctctctctgtctctctgtctctctgtctctctgtctctctgtctctctctgtctctctgtctattacatacacacacacacatacacacacacttttaaaaaagccaaaggtaccgttatgtgcccagtgctagggaggcagaggcaggcagctccctagggctcactggccagtcagtctggcctcattggagaatttcaggctaatgtctgaagaagaaagtgaacagtgtctgaagagcaacagtggaggtaaccactggcctctgcacctacacacacttaggtaaacacagaaacatgtgagcagtgcatgcgtgcacacacatactcacacatgttctcacatacatgtacagaaatcaagggaaagatgccagaatgcttagctggcatagcaccatggtgacataactggtctgtgggaaattgttcatgtgcaccttagtcacctaattaaattatcaatcagcttagcatggtgccacacacctttagtaccagcactagggaggcagaggcaggcagattcttatgagttcaaggtcagcctgatctacagagtgagttctaggttagccaaacttacataaggagactctatctcaagaaaaaaaaaagtgggctggagagatggctcagtggttaagagcactgactgctcttctgaaggtcctgagttcaaatcccagcaaccacatggtagcttacaatcatccataatgagatctgatgccctcttctggtgtgtgtgaagacagttatggtgtacttacatataataaataaataaatctttagaaaaaagaaaaaaatatgtgtttgtgtgtggaggctgaagatgttagtcatgtttgggccttgtaccgagtgtttgcatgctaattacaaacagagcctatggaaatggtaaaagtgccatcattgttcgttgctcctgataatatacttgtatactcttccatggaggacagtttattatgatatgtcaggaactgcagaagggctaatgaccctctgtacaaggaaacgaatccagaatgtagaggaagggctcattggagtgctcagtgtccttttgattggctgatatagtgttcaggcatggttcattataaacattatgattattgttcatttagtgatctgtaccaaaagtgcacaatattgtccatgtatactgatggccccgtgagtgaagcagctttcatagaaaagggagaccgtgtaaatggggtgcagctaaatcctgcccagagtcctagatataagaaggggaatttttcttcccatccaagcagatgatgattgcctttgggtgttgtttgtttgtttgtttgttttttaaatgtagcacaatctgatattacaataaaatagttcttgaaatttgagtggttctaggtaaagatgaaaaggatgggtgataatacacctctacaaaactagagggagatgggactttggtcccatctttggtttggacagagccagggtggagctgggcacagagcaagaggccctggctgctcagtattttctcacacagaaggatcatggaaagaacagctattctacattgggaaaccattgagacccttaccgaggcctccctgggaaggctctggctccaaaatgagcaatgtctgaatgaatttgtcaggggaccacaagaccatctctacccactcaccccccctgcagctgcctgccaccaagatggtcatgacatcacgtctaaagaggcaccaagacccttgaaagaaaagactccaggagggcataactctgaggacgttgatgttgaagaagggcttgtggttctccactaggtgggaggttaggacacagctttgtcctagcctgtcctcagagcacaggctagagttgaaaaactcactggggcaggtatttagggtatgtaaagcatctagaaaaatcagtgtttagttctgtatagtaagaactgaacatttgggtggatggatgaagtcgaggcctcctaccaagcatttagggcagcgataggattcctgttggatctggtattatccagtcagcacccaactaacctagaaacattcataatcacggctttggatacatttactattgatgatggatacatttactattgatgaaattgatggctgtactgtcagagaggagccctgtgtgtacaaagaggcctaagccagagttctgttttacagtaggcagcccatcacctcttgcacacaaatgtcctcctccttggggttttaataatctgttagggccaacaatataaaatcagggacaacgggtttgtgttgagcacaatggtgcttcatggggccaagggagtaaagtcaatatactatgtgagaaacagttctggatgcaaaccaggtggcaggaaatatcatgtaaggttaagtacagaaaagaaactgtggggaagccagtaggccctccccgatggctggggaagccagtaggccctccccgatggctggggaagccagtaggccctccccgatggctgggccctgctcacatttgcactgaggtggatgagcatgcacagggtttatttgtaaacgagcaaagaggaacctaaaccactttgatcacacacacccattttaatcagttccgtatatctattactggaaattaagataaatacctacaaactgggaaaatcgactatctaattatttaccttctaaccagattacccctaaattctacttatattttcacatccttgtatttcatctcagacgctaggcttctgaagctcatagagtatttgaattcactcactcttctttgggtcaaattggaacataaagatataatgaaatcattcacttgcattcagactttacacatcccatatagatcaatggggacaagtttggaagacatatcgcagcatcagacaaatagaagaacggaaatgcattacagatctcacgcagagattggtcaaatgattgcagcaaatgagtcgaaatatatcacagaacttgtacatagactagtcaaaatgattgccaaagaactgaaataaatcacaaaatacatgcatagattattcaaaatgatctctgtacagtttcatctcaaaaaaaaaaaaaaagcttttacatcagtattatcagcagtaaagggcaatgtacaatttcagcctaaattgactgtcctactttctccccagggcagcattctcagaaggatccatctatgatccaggcagaaagagcagatgtatctgaatggtccactatcttcttcaaactgatttccacaaagaccaatagctctatccaatccttataatctgtttctctttgctacagagtcattctgtaccaacagtaatgtctggacccttctcctgggaaaggcactttgaaccttccccatggttctccacatctgttctccacccattctccctccagcggtggagatgatgatgatggtggtggtggtgatgatgatgtccttttctggtcaaggagaagaaagcttcatagcactatggttgaaggtcagctttcctaggtcttttgctaacatttctgtttgtggggtttctgaatcatcggaggatacttgtttgaaggatgtctgaggagatcttgggttcaaacttgagtcaaacaccgttgatgcccccaaaagttagctccaaacagaattgcttagtcctgggaaaaaatgaaaatccaagctccaactggcaaagcagagaggacctgacaagtgagcgttttcgacatcgtagaagagaaattggatgactaagaacaatcatcttcctgacagattatgatcttggtcagcctggctctgctgagtcactctgctaaatagttcccctcacgtggcccagctgccacctgtccccagaggcgccaaaggccacctgatcccaaccacaacttcagctctcactacttgggttgttcctgctgctgtatttgttttgttcttaggttaaaagcataatatgtatacaaaattatgtaccaggtaaacgttcacaattagcttcatgtcaaaattaaaattagcatgatcataaactgtctggtttaaccacaccttcttttaagcaactatttactctactctgtagagtgttcctttgaagaatgttcaagaaaaaaagggaagttgcaaaataataggtagcattctctctctctctctctctctctctctctctctctctctctctctctctctctctctcttccctacccctctatgagtaactaacaaaccatcaagcactgtcttcatgaggctactcagctactcatacaaggaatcttttttttttttttgaagatttatcttcatgtttacttacgtgtctgcatgtgggtatgggcatgttagtacaggtgcctgggaggccaggagaagggtcagactccgggagctggagttacaggtgttgtcgggtacctgacgtgtgtcaagaactcagctcatctggaagagcagcaaatgctcttagccgctcagccatctctcccagaggaatacaatatttatttaattttttttcttttctctattgagcgatcattttattgtctgtttatattacttttgcaatcaaaatgtcaaattttacaggtgaagagacaccagggcagggtaagactgggggattttttttccagtgataaaccatctccctaactaagttattctctcattcattgcaatttattctcacttcctccttggcttgggctcactctgtagatgagggaagtgttgagcgtctgctctgaactgaggaggggactgtgtgtacgatttcacctgtcactgtgaaaatgtccaaatataaaaacccagcaagaaagcatggcattcttagcatgagcacccataactgtccactttctgcccaaagcccccacattcttgcccctgcttggtagctacagcctagatggagcacttgccttgattgatgtgagacctactcctcccccccccccacgcactgtgggtggccgttttttcagggagcagtccagataaaaaatggagggaagactgtctgccttctcctgtctcgacctcccccgcccccggcctcccccccccccccccccccccccccccccgccttgcctctgcactcatttgctcctgtgccgctgcccctggtcattcctttgcctacaatagaaccaagctttcaactagaaagcagcagctctccaggaaccttctgaagcatccagccttgtggactgaacaactaccacggttttacgcctataaataactttttacccatgcttttgtaagcaaccctaattaaactcattgggacacagaaggtgagaaggtgaatggaggtagaagagggggagaaagagaaataggaagaggagaaggagctgaaggaggaggaaaggatgaagaggaagaggaggagaaggaggccatggaagtagaaggaaaaagttgtttgggaagagggcttcagtggagttgggggtacgagagcaataaggtggatatgatcaaaacattatatacatgtctgaattctcataatgaaatccattgttgtatttaactaatacacactaaaaagttaccgatgcaaaaagcacttgtcgtatgaggaaactggacaaaagtgaacgagaaaagcaacagatggtaacaatgggatgtcattagtgtgaggtatgctgaaaaccattgtaaaatcggatgtacccttttaaaatatttttttcttacatttcttagttctgcatacatgtatgaatgtgtgtgggcacacaagtgccactctgcacatgtagagatcaccgcacaacatgtcggagttggttctttccttctactctatggggcatgagatcaaactcaggtcatcagcttggctgtaggctgtggagcagtagactgtgccaccagacagaagaactgctaaggtggtagcaaggttcagaacctggataaaactcatgagtgagaacagcaggtgtttgaacgaactagctcctgaccagattcctgtcctggagcaagtgaccatgacaccccactaagaggaccatgacaacagcccgtcagtagtacacagcctagagttctccttgctaatgatgtatctagggaccctgagtgcttagccaatgagatcccttcctaggcatccttttctgcaaaaggtatttagtctctggttcaccctgagtcagtcatatacctcatcatctgccatgagcaaagcagtttggacaaacaaggactgcctccttcatcaaggaccaccaggaggtgggggatggagtgagaagccttcgtcccttcaccagacagagcagtgcctaagtctcctgtagaaggccatctttcagcccctctgcactcctggcactccctctgagctatgctggattcctccaacctgggctcatcacaggcccatggcccattccaacttctcgaggtccccagtagcgtctggatacacaggaggatgggagcccccattcttcacagttccccagaggtctctgggtgcacaggagtttgagaaccatagcctgtcccagaccccgctagttctcatccgaagaaacacgggctaagaccccaaccttagactgcatttcatatctgaatggcattttggcatcccacgagtctggcacactagtgatgcagactcatagtaagcaccttcacccaacagagccacttcccaggcccttgaatttactcttgaaacaaaatattaagacaaaaatcatgagaatctaagtaaaggaataagaacatgaagtaaaaattagaaaattaaaaaatataacaactaaaatgaaaagtcaatagatgggctaagtttgcaggcaaaaataaataaatcagaggcaaggttagataattaggaactctggagactaggaaatgacctgtctgagagaactatgggcaataaaagacctgtgttcgtaagatctgagtccccgcagagagcagagacagagacagagacagagacagagaggagcagcagaaaacatatgatcgttgcaaacttttggcaacaggcataaagctgcggtttctaaacagaaatggtaacaaatcccccagaaagagagagagaaagagaagcctagagtaacccacactgagacagatccacagtcacatttctgaaaattgaaatacaaaccctggaaagtaggtagagttaaacaatacatatcgcagacaggtgaagtcaggaggaggtggacagccttccccgaggacagacagacagaacacaagatttcctttccagctccatgcctgatgtgactgttcttgctctctcagttggattctgcctctgttttttcctttagtgtgccttgtaacttcttctcgataagaacatgatatctgaaataaagaggtttcaggctttagtgctatggtgggagatgtgtgtgggcctgctatttatgattcagtctttctgatctgcagctctgtgtgcactatgaactacacacaaacaggtccatttataatgtgtttatctttagtgtgtgtgtgtgtgtgtgtgtgacactccaatacacatagaaacatacatgtgggcccatcccatgacgtgtgtggaggtcagaggacaactctcaagagtcaattatctccttctaccccgttgagttcagtcttcaaaacccattcaatgtaagtcatgatataaatcgcaaaattaagaactacatggccatcttaacagatgcaggaaacagacatttgacaaaacctaatcactcttcttggttaaaatgattggagaaccaggtctagaagaccatgtgcttgtcctgtttaagagcaactgtgaaagtacccacagtttgtatgcttcatgataaaagacatacttttctcatgttgaggcagaaaccaggggaaccacctctaattagcctggtgctgagaatcctagccagcataagtcacaaaaaagaaatagaagttttgtactgtggacagtccttctctataaaatacttaggaatgtgaaagtaaaataccagacctcagaagtgaatttagcaatgcccccaaaacactatttctaaataatatcagatattgaaatctgacttattcatagtggcagcaacatatgcagtacttatgaataagtatggcaaatgtgtgtcgagtagctgtttcctccacactgaagtattccctcctggatgggggagaggaggctttcaaaactcacaagaaattgctaagaatgtgcatcgttcacttcttcagtgttaagtctgaaagcataaatctttaaagataagagagagaaaactgtgggaaggcctgaggagacagctcagtggtaagagtttgctgactttaaatccctaaagccaggcatggctgtatgtgtgcctgaagccccagcagtggagggcagggaggagggcagcgaccagtagatcatagaggctcattgcctgaacagcctggttgaaacagcgagcctcccattcagtgacagactctgtcccaaagcaagaaggcagaaagtaatggagaaagacacccaatgtcttcctctgactttcacatgtgtgtgcctgggcacacatgcccacaagctcaaactcaggaaatgttcacacacacacacacacacacacacacacattttgactttgcattaggtgaagagttttaagacatgaccccccaaatacacaatcttgaaatacactgatataattagaccttttcacatttaaaacttctgttctttgaaaagatttgaatggcaagaaaagacaagctatatatactgggaggaaaaaaaatgtcacccaaatatttttacatctttaaattatttaacttttattttattcatatgggtgttttgccatatgaataaaagctaagccatcacacatacttttgaatggtttccatgagaaagatagacactaccaagttcgtgtgtgtgtgtgtgtgtgtgtgtgtgtgtgtgtgtgtgtgtgtgtaggccagagtagagtattaggtcctctggaactagagttacagttgtgagctgccatgtaggtgctgggaatcaaacccaggtcttctggaagagcactcttaacttctgacctctccatccctaatgcacatatatcttacaatagacttatatcctgaaaaattttaaaaatcgtaaaagctcaatgagaagaaaatagcataactgagaagatggtggccatctggagagctatctctgcagctgtgcaagcagcagtatcactcgtcactagggaaatgcagactgcagtcactgtgtaacaccaccacacacacttctgagtggcttccatgagaaagatggacactaccaagtgcaggagacggaaagacactagaattctcacaccctgctgctgggactgtaaacttctacaaacatttcaaaaaaacagctcaaagtacttaaaaagttaaacatgccctgactacatcacatgccccagactttcaattccaagggaaaaggaactaaatgttcacaaaacatcttggactcaaatctcaggagcttggtttgtcatagccccaaaatgaaacccacctgaacattcagcatgtgacactgacgtggtacatccccaacacagatcagagaaacggaaggaaagataagtggcttataaataaaatttggatgaatcatcaaaggaattctggtgagtgaaagaagccagggaaaagactgctgttatatatttgcattatataaagttaaatctgggctggtgagatggctcagcggttaagagcactgactgctcttctggaggtcatgagttcaaatcccagtaaccacaaggtggctcacaatcatctgtaatgagaaacaaacaaacaaacaaaacctatgggctagagggagtgagggccaggagcaagcagggccgggagtctgcagagatataaaataggtgtaaacggactggggggcagacatgccatgaggaatgctctgggagtgattcggaagtgttttttctttgacaatttctcacatatacgcagggtatcttgttcctcccagagctctctgctcccactgcccccaacatgtcctcctccaaccttcatgtcctctcattttctcatggcctcttttcatgtccaggacactgggttgaagttgttgaaataacaaaatacaagtaaggtagtgggggtcctaagactttcttacccataagtccacacactggcctttgaacaagtgcatacaaccggatacttagtgggagctggccacctctgcaactttatgcaaaccccagtgtgggagggtctggaatagttaggtagaaaccacctatgaggttcatttccaccccaccctcccccaatctgggctgtctgtcgccttcagctgccagttaacccaagctggggcttttctctttggtttggaggagctgactctgcctgggttaagtgaagtgtttgtggtggttcacatacagggaaagtaccctgtgctgacccaaactacggcccctgaggcaccacaccaactcctgggctgttaagaaaaacaaatcctgtggcaaacatttaacaccttaaaattctctctctgtctctctctgtctctgtctctgtctctgtctctgtctctctctctctctctctctctctctttgtaggttctcatgtagcccaggctgacctagacttcctgctctcccgacctcacttcccaagggctcagacaacagacccacatcactaggccctgttttttgtgcatttccaactggtctatccttttttttttttttaaccaacttgagattttgctgacattgaaagactatgatgtcattaacaccttcccccttctgcctctgagaatagacacctccgctactgagaagggaccctaaaacagatattcttggtggctccactaaggtgacttcacctgcacacagtcatgagaaatagcagtccatttccagtcaaatcatcttgtgcctctaaaaagtctcttctagaatgaaccaaacccatgactgacggaacaaaggtggaaaatcagcaggcagtttccgaatcaccatctgcccctacactcacatgtataatggataacacgagttttcacttatgtatgtgtctgtaaaatcatcttccaatcactcccaggatataccttatgcaaatatagcctattcataaatgaaattcttaaaacaaataaaaaatttaaaaagtaatcacagctttcaaggcgaaatagataaataaaagctcaaaggtcaacagctcttggggagccacatgggtacagcagtgaagccattctagctttgggtgggcattatactctgcatataaaatcttctcacaagatcatgtattcgtctcccaatggcagcgctgtttgcggacgtgatggaatgctgaagtagatcataggggagtgtgccttggaaaaacggacctgcttgctggccccttcctgtttctttttctgcttcttggccaccatggcatgagcagccttctctaccacaagctcctacactatgcttctttgtttctgtctagcttcaggcccaaagcaacagggcccaccagccatagacagaactgtctgaagctgtgagcccaaagaaattcctccatcttgttttcctgggactctgtcacactgatgaaaaggtaactaagaagatgtgggagcaggccctgatgcttggaaggatgttcctgagccatcctgactgtaaaggaatttggagactggggtttcagagattttgaaaatttaaaggcagttcattgatgctcttttgttttggtaagttctatgattctaggctttagtaagaaggccttcggaatctccaaagaaaccaaacgtgtacgtgggaagaagtgtacttggttcgtgtgattatggagtctgacaagttcaaaatcttcagtgagagctgtctggctgtattcacgaagaaccgatgccatactgtctggctggcattagagccctctggtaggtgtttcgggagggcgcctgaccttgcttcctatctactttgtgtatatgtaattcatattacacaaaagtgatgttagccccacagcctgctgggtggattaagaagtcacaacaagaagctagagagatggctcagtacttaagagcactaaatgctcttccagaggacctgggttcaattcccagcacccacatggcagctcatagctgtctgtaactccaagacctgacatcacacagacctacatgtagacaaaacaccaatgcacattagacatacagacagactgacaggaaggaaggaaggaaggaaggaaggaaggaaggaaggaaggaaggaaggaaggaaggaagggagggaggaaagttttcacaaccagcctgagataatgagaccttgtctcaaacaaatcaactattaaaagagaaagaactgcccacccacaaaaccacgttttgacactatcagaatttctgtttgtctttctagaaacataaccatatacctataaaaaaatcaacaaatggtgctaaattattcaagttaacttttgaccttttacctgatccaagatctgaaaattctgtattaggtagatatcacttaaattatatcttgttttcttccatcataatgggagaaattggtgtctttgttttttatattaaattgatggttgttttaaagatttattaatttttaaaattgtgtgtagttgtatgtttatctgtgtgagcatgtgcacacatgaatggtggtgcctgttgggcctatatgccatggagttgaagtcacataaggaaaaccatgatgtggtcttatccatatacctgccagatgggcaaggaggtccaccaagtgttggaaacgacatgaaagccagtaggtctcttactgctcacaggaacacagtagatggtacagcatccctgggaaaagggaaagtatctggtatttttctaataaaaaataaatattcaaccttggcttctatggctgtattaaaataccctgaaagaaagcaacttaggaggggggaggattactttagctcacaggggttgcggtggctcacgtggcatccacagttaggagcagggaggaatggactcatgctcagctcactctctctgttaacagtctaggacccaaacccagaaaatggagcttcctttattcacggcgggcttcctcactttagacaacaggattgagaaaatcctttatagccatggtatgcctggtttaaacaatccagagactctctttctaggtgactccagattgtgtccagttaacaattaactgtaacggtcacaatcgtcaactcaacatcagcaactcccctctgaggtactatcgagggcaggtggctgcgagtgtctacccaaatattcctaagttttattggtgatagaaaatctagggtttagtaaatgtgagacacagcccaaattgagggatagccatgcatatgtgaagcaaagaaacagagcacgtagagagatgcgaactctcaagaaggaaatcggacacaaaacgactgctgctctacgctcttcgttttcattattataaagatcaagagcaggtaacacgaacctatggcagaagccaggagatggggagccaggggccgctggaaggagggaggaaggagtgtgttgctcagggatgaaggattctaaatggttgctgagggaattagacaaataatatgtgtgttgttcagtggaggtaatttgtgtctcactttggaaaattacagagcaaagtcaaggagcgacgctttgtctgctttctgcctggataaggaaggacagctctagaagagtgtttctcagcctgtgggttgcgacccctttgaattatatgtgccacagatatttacattacaattcataacagtagtaaaattacagttatgaagtagcaatgaaaataattttatcattaggggtcaccataataggaggacactgaatattaaagggtcatagcattaaggaaggctgagaaccgctggagagggactgaggcagctatgagagagagaattaattacccacagccctggagccagtctggaatagaagcttggctgcccttgctatcaacagcagcagtctggcctctctctgttctccaaggtagcccatcctagctccagcgtgctgatcttcaagagaggagggctaacctgttgaaatgctggagggtcctctaccctcgtcttctcactgtgggctgcacggcactctgttccattgtgaaacactgggcaaccagccacggtgcaggctttctatggtgatgtacctgcccaggaccaatgttcctttgcagtcttctccagcagagctggcaagggcacagtgaggggaaggattcttacctcctgggcagctctggcccaggcatctggccaagctctctgatcttttaccttctgctgaagtcaggtatccaaatgcaaagcctgctctgtggcctgggaccacgtctacccccctccccccccatcccctctgcccctctctccacttctcttttactttcctggccacaatttgagcctcagacatgacattactgattttagaatgagaccctcttccaagtttatctcccacccccaccccagagagagttaccagccacagggcaaagagtagctcatcattggctgtcagatcgaccttccgcagtcggggaaagacagtgtcaaaaccaaacaaatctaagctctgcctggggagaagctatacacagtcactgcatgtgcccatttcatggacaggcaactaggcctgaacccagctactgtcaccatagtaggaccttgtgacagatcagaacatgtgacctgaagaaccacagaagcctgtctgtgaaccactttcacacagaaagtcagaccaaggccagagtggtctttctcctttaaaacaaacagccctgacaggagttctgtgctcccggctcccttcctttaacagcactcccttctgatagcgggtgagctttttccttttgtttttgttttcccttttttctgtattagtcagggttctctagagtcacagaacttatggactgtcaatatattaaggcagttccactaatccaacagtgggcagctgtgaatgggaagtccaagaatctagtagttgctcagtcccaggaggctgaatgcctcagctggtcttctatataagctggaatcctgaagatgaaggttccaacagatgtgctggcaagtaagtgaaagcaggtggagagggaaaaaaaagccttctttcttccattgtccttacatagacctcccgcagaaggtatgcccagaattaaaggtgtgtaccaccatgcctggacctacgcattctttacttggaactggggctaactgtcccaggttggccttgaactcagagatctacttgcctctgtctcctgggattaaaggtgtacatcaccttgcttggggctaagcttttcacagccactatgcctcaagatccgtatcaaaaccctgtcttccagcctcaagatctgggtcataggtgtggcctctatttctggattgtagttcattgcagacacagtcaagttgataactgggaatagccatcgcagcagtggtaccaatccaggctccttttaattctttttttttttttttttctttttgagacagggtttctctgtatagccctggctgtcctggaactcactctgtagaccaggctggcctcgaactcagaaatccgcctgcctctgcctcccgagtgctgggttaaaggcatgcgccaccacgcccgtccaggctcgttttaaagacaagcgtagatgtctgttttggtggggcatgtgcagaaaggatgctcttttgaagatttattttattattaatgtatatgaatgttctatttgtatgcttgtttgacagaagagggcatcagacagaacagggcaccatatggttgctgggaattgaactcaggacctctggaccactgctcttagtggctaagccatctctccagcacagaaagaatgcttttattgggagggcaacacacctgagagggaaggttcatgttctggcagaggaaaatacagacaccatacatggccctatgcgtgtcttctcccttcagtgaacagaacttacaaggtcacaaaagggggtgtgctttccctatagtctagaaaaccaaattgttgggggctcagactgtgccagcacctcaggcaatatgtactcagtgtccattgcactttgcccatgggctttaccttatgtctccagtacagggtgctaggcgaggtatgcagttcagggtaaacaggttgctgctggtgttccctgtaagtgagcattgtgtgaggcccatagccgaggggtcacctctcccctggttgtgcagaggagggcatttggagaaaacttcatgaaactagtaactgcttggatgggttctcacagaacaacaggagcttctatttggtcaagatggcctggcttcccccacccccatctgtggctgtcaatgctgcccgctgtcaggggtcccatctggtgctgtcaaagagtacttgggctgtcctccatgtgactctccatgaggtctgaacttctccacagcaggaggagaatatccaaaagtgaagaaggacatagaagctgtcagtccacttaggtctggacctagacacctgggatatacttctctgttattagaacaaccatgggacctgttcagactgagaagacaaggttaggggtcagggactgttgaatgtataaaatggtggccatctttgagaaatcaagtatgcaaagttttgctatttccccaatactgtcttgagaaatccaacagaaacttaaaaaaaaacataatttatttatgtctacttgggaataaaggtgtttatctgtcatttgttctctttcacttctgtagtagctttgagcaaatataatacacaaatagtactgcctctaccaaaataaaaagacatagcaacccaggcggtgggagctggcctatgaacccaatatggagaagcagaggcaggaggatgaggagttcaaacttgatatgtaactagctcaaagccagcctgagccacctgagtccctgcctaaaacagcaaaatattagaaaaggaagaagtccacggagtcatggggagggaggagtagggagaccgatctcaaaggttggctagggtagtttaacgtccactggaaaggggagccagggttgccagagagggactgctgctgttagcatctcggtcactgtcttaattacggttttattgctgtgaagggctaccatgaccaagaccaaagcaactcttataaaggaaaacattgaattggggatggtttacagttttagaggttcagtccaatatcatcatggcaggaagcacggcagactgcaggcagacatggtgctggagacggagctaagagttctacatcttgatccaaagacagccagaagagactgccttcaattggcagctaggaggaggcgctcattccacactgggtagagtctgaaaataggaaacctcaaagcccaccccaatgactcacttcctccaaggtcacacctactccaacgaggccacacctcctaatagtgcccttctctgtgggccaagcattcaaacacatgagtctggggggttgggagggtgggtagcaggggtcctattcaagccatcaccacgttcaccttttcattttgtcctgtttgggactcacagtgttatgtttggcgacttaccccttagctgtaaacagctgcagatggacgatgcaaagattgttcttctctgttcttctcaggactgagaaaaatgaagaataccacccctcctccatgacaaggagggaaccaggggtccagagcagaaagcagtccagaccacttaagctgtggctctgctggctccgagggcagccagagcttcactggccccttcttggtaacagctggtggaatgccccgacctgcacagaacagggaagggctccagacccttcccgttgagcacacatttcgtccagatgtgcgggtggaagcagagggtggaaataccaccgaggctgacgataatgtgttaaccaaaacaggaagccccgaggaaggtggacgagtgggtttcacttcagctgtgtgatttttatcaatacgtttattgttctaaaactcttctttttaaaaggtattttcaaaacaagcccaacctctgcttcccattctgaattattgtgttgactctgtgcttacatttagggcaagagtggaagaaaataaggacacctggtagaggtggtgaaatatcaggtccttgcctaggagtggggaacagggaatttttactgactgagagactgtttcctcatggagaaaggacatgggtccaggaccctgggcaacccagaaagaattaggatgagctgagctctgtggtgacagcatgatctcccttaagtatcaagcaccccagtggcagacattcaaagctaccctctgcttgagacccaagcaagtcctgtgcatgctcgttgtttctgtgagaaatttgcagagcatgaaaattagaccctctgaagaacaagcttattaatcagaaattatcagcagcattctgttggctttgttctatgaaacaaacaaacaaacaaacaaacaaacaaacaggagatttaagttcttggtctaaatcaacctgctattcgacaagctgccattgatggtaactctaggaagaggctgggctggatcggcagccattttccattccagggagctctatgcagtcatgaacagactgttgtaacatggacaacaagttatggacacagacgggtgttcacagtagaatcacaaatggacacacagcgattcatcttgaatttctgacaatgaagctgagatttacgatcacctggctgtgcctcctgcaagcccactgctgcccccgggggctccagcactcacctttccacgggagtgaaagctcagagaaaatggctcttccattgggtacttagattccaaagcaaagaaacagcacggcacacattaggaaatgtgtgatggtcactagccacacagatgctaaattccagccctcctggagctgaacggaagtttcaaagttgactaaaattgactgaagagtcttgtcacattgtgtgatttctgcctggaaggcatttgtcccttggcactgcacatgtggccaacccactgctggaagagccttctcgcttcctgattcagcctctgaagtggctgcaggtcaaggccacaccgaagagactgtagtgggcagcaagcctgacctcagctttgcctctcctgccttccccaggactagtctactgtgtgtaatgtctaggctatattgggagtctgtcttaagttttaaaacaaaaagcaaaaatgtagccccccatctgtatgcatctgcatttttttttttttttttgagacagggtttctctgtgtagccctggctgtcctggaactcactctgtaggccaggctggcctcaaactcagaaatccccctgcctctgcctcccaagtgttgggattaaaggcgtatgccaccactgcccagcatgtgcatgtattcttatacatatgtcttcatgtgtgtacattttgatgctaggagatcacccacagctgtcacctctcatttcttcttttgaagcaaagtctttcactgggacatggggcttgtcaagtagtggagtttagccagtgtgcccaaagactctaccatctccacatgggagtgacaagtgggtgccactacacctgacttttcaacatcagtatcaactcagattttttttaaagatttatttttatatgtaagtacactgtatctgtcttcagataccccagaagagggcgtcatacctcattatggatggttgtgagccaccatgtggttgctgggaattgaactcaggacctctggaagagcaagcaggcagtgctcttaaccactgagccatctctccagccttgggatctgcattttaattccctaggtaaattactgtgacaggaccttaggacacccaccttctctcagatgaaaacaaaattagagtatagcctggcccaaccttacttctggacaccagtgctgtcctgagaagaagtggcatccagaaactgaactgcagagaccaggagagtcagttctgggaaggaacccaacagcagctgctctaaagtttccccaaccaggcatctccctctcaaagcacacagctctcctatctggccccctcaaatgaagccctttccttggaccatgcaagctaaatggatcccagttacccatgccagggatacatctctgtttagtcttgcccaatacatgaccctgctgacagggcattgataacagcaagctaggcaaccctgccaaggcccagctttgctcttgaacaaaatgcctggtttgtctcacagagaagtagccatggtcatcactcttcatgagaggactcaactaaccctggctctctttacccactcagtggacctcaggggtcaaaaccagtacccctgtttgtcaggatgaaagtgaagagtaaacagagatgagaaacacacagtctgaaggccatggggacatcatgacatcgatgtcacaatagtttgtgacaatttcttagaaagaacaaaaattccataatttatccttactaatgcgacaaatatttgaacactatgttattacacagggtgggtacagagaggtttcccatcccaaatgcttttctcacttacctaatgatctgcttgccccttgaatccaggtacaactatgacacaaatgacattcaatgacacctgaggccaggtcgtgaaggaagtacagcatccttctaatctgaccgccacattcacacttgaccttcccatacaaggccaggaagtacgccagccagtatccccatcctagatcctactaggcagcactggccaccatcctgttagtgacaattgtttggtgactatagcccagccaccgtccaactgtaactgtactggagatcgccgaaggacatcagcccccttctagctataacagctaagcaagcaatggcagggtttgattactttagcctagcagaagaccagaacctagaggctagaatgagacgacccgctcactccatttccccactgctctgtgacaattacagaatgtaaccatttccgatctacgtatatgggattaggaagaaaagtagatgcaggggtctttgttgtttttgctgaggaagagggagaggttgaccagtgagaaaatatatattttagccttgttcaagttatttttttttaaataaaaatggaatacacagggcataaaaaaggtgtgtgtgtgtgtgtgtgtgtgtgtgtgtatgaatgtaattgtgttcatgtagtctttaggtggtcaaagctttcaacaaatgaggagaaggaatatacaaacacacgcgcgcacacacacacacacacacacacacacacacacataaacacacacttgtgaggatctgcagtaccatttgaggccctgggtttggctgtgtttttgatgttcgcttttattttgagactaggtctcaggggctcatgtcgtccaggttggccttgaacttgctatgtgggcaagaatggctttgatcctctctgtctttacctctccagctcagtgcccagcttatacagggttaggacttgagcacagggtcccgtgcatgccagacaagcactctactataggtagaatgtctctagaatgtctctaggaatgtcaagagattattctggctccctgacaattctcgctgtggctctgctccctccctggttgctgactttaagccctcttcctccctttctcactagcacctgccttcacttcctgttatttcccctgcttccttctttggcccttttctccctctctgtttggaaggaattcttgctaggacggtctcaggaatctgcccacaattatggctccagtgtgaccctgagagagctatgctttcttctctacatagctcagcaaagcagcccacaggcctgaaggaagggctccaaccagctcccttctctccattcagacaggacacccaggaaagcctgtattcagaggaatgcacgatgatctaaggagcctggcagctattgtggggcttccacctcaactctgctctgaccctaaaccactcagagtcctcaacatagccccatgtgtcacttgctctggtggagcactggtgaggagcttcagtcggagcagtggtgggagtagtagggcataagcaaagagttagggttacagaaggcctgtggtgaactgttaggtcccacattccacacaatgccatccatgatggtcttgatgttacagaagagcaaaccggaggctgacaaatggttatctgtccagccacacaactgatggagagagaacagaactcatgcctgccctagcccaggctcattcctctacatcatacacacctggctcatgggaggtgcctcacaaacatggctgaaaaaagacaaatggataaatccatgaaaggaggaatgagcccaccaggcacagccattactcaggataacctgcagaaggatacagaagatatgacaagaagtgtgtcaagctgggccagtgggatgggccaggctgggtcaggctggagagaaaaggtcattgcagagggtaggaagatgcctcacctaggagaagctgtgcccagaagaggtggctgcagtgggaacctggatcttctgcagcaagcctgtgtgtgtgtgtgtgtgtgtgtgtgtgtgtgtgtgtgtgtgtgtgtgtgtgtgtaggctgtggctggacagggagagaggatatgggactggattagtgaagaacagctcctactcactgagcatcctgatgcaggcaaagcctcttccattatgaccctgagagcagggaggctttgactttaagagaggctaagaatcgggtcactcattagtaaccatttggggcatagcagttcattttctttcctttctcctgtgtggcatgcatgcatggatatgtgtgtgcttatgtgtgtaggctcacatttgtgtagtgatttgtatggacatccaaagttgatgtcagatgtctttcatgattactctctacttttttcaactcagagctggttgctatgactagtctagctagccagcttgctccaggaatcccatctccaccttctaaaagctggagttgtgagtgggctgctttgtgcatctagcatctatatagtgtgctggttggtttttgacacagataacttgacacagacattcctaggaagaaggaagctcagttgagggattgcttccttcagaatggcttgtaggcaagcctgtggtacattttgttgacagatggttgatgtgggaaagcccacatctggtcagcagtcccaggttacaaaaaacaaacaaacaaacaaacaaacaaacaaacaaaaaacaagctgagctagtatgaggagtgtaaaataaattatattttaataaagatataaatagtaaatcaatccccagttaaccacacagagaaaccaagatttatttcaagctgcacctcaatatctgggtggttaaatgatctatcttttttttttttttttttttttttttggtttttcgagacagggtttctctgtgtagctctggctgtcctggaactcactttgtagaccaggctggcctcgaactcagaaatccgcctgcctctgcctcccaagtgctgggattaaaggcgtgcaccaccacgccctgcttaaatgatctatcttaacatcctatgtttatctggctacttcctagccatggccctgtccttgtgactccaaagctcctccctattctctcttctgcccagccattgggtgatcagcatttattgacaaggcaaagaataaatggtaagaaccctttacacaaactggagacaggagtctagacaatactgagggttgagacaagaaatgggggcagaaaaatcagcatttgaataacctaaagataacctttagacagtgcacaaaaaccattatgtctacaaagacagaggagcaagccaggaagcagggttcttccttggttctgcttgtgttcctgcctccagctcctgcctctgtctctgccctgatgacaggctgtaatctgttgagtgacatgaactctgagttgtttatagttagtgttttatcacagcaatagaaacaaagaggaagacacatggattccggatccaaactctagtcctcatgcatggtgcttatggggcaaacattttaaccattgaactatctccctggcctctcagttcatcctctgttgccatagcagcagaagccagatactggaagctaaataccctgtaaagcaaagaagtttatttagttcacaggtttggaggctaaacttgaaggtctaaacttccatccattttgtctctggcaaggttgtgtggctgcatctcaacaaaacagatggcattgtggtagaattgtgtgtgtgtgtgtgtgtgagagagagagagagacagagagagagagacagagagacagagagagacacacagagagagacagagagaggaacagagagagagagagagtttgattgactggttgatttaggggcttgttttgtttgtagcaatttgtgtgtgtgtgtgtgtgtgtgtgaacttctcagagtcctgtgaattatattaatcccatccaaggacattatcctcagtaatctatctgactcccactaaattctgcctcatgaaggcccatcaccatcaccactgccactccaaagcttcgccttctagtataatagtctttagatgacacactcagatcatctgcaactcacagtgggaaggtcaatcttggcctcatccccacgagcatcaccatcatcattcccagctttatcactgccatccgtcaatcttgcatcatcaagggctcttcacagtaaagcggagggactgtggcctttggaaggcttgttggttgttagcttagctcatcactccataggtgggagcttggggacactttaatgcaagcttcatattcatcatatgtaaaatggaataactcaaaaaatatagtggagggggaaatagtagttaaagggataatgattaaggttttatacaacagggataactcaagtatcccgtcccacgggattcagttattcgtgggtgcgagggggaccgcaaacctgtaaggaaatgggattggaagagaaaagagaagcggatgaccaagtagattgtacctatcaaggtctccgtatattaggctgagacgcctggttttaaagcatacatctcggggaataggggaggggttgagggggaatttaacaaagaacaaagagtgggcatctgctgacatgagggccgaagtcaggctccaggcatcgggcactctgcatcttatctctggaacatagatcctccttgacagccttggggtgtcaggcgggactcaggcgtaactcatgtccttggaagtcatgggagtcaggaagagatagggaagaggggactataattcagcttttacagcctcaggtgccaggaagggaacagggaggagggagtgacaaccggctcctatcacgaggccatttggcctgtcagggtgggagattgtgagaagcttgctttctcacggtatggtctctgacacacaagaaatttattgcacagatggtgactttaggtaaaacaaaacaaaaaaccaaaaacaactaaatgaggtaatacatataataatgagtttgatttagccatttgtcttagttagggtttaactgctgtgaacagacaccgtgaccaaggcaactcttacaagggcaacatttaattggggctggctcacaggttcagaggttcagtccattatcatcaaggcaggaggatggcagtatctaggcaggcatggagctggaggagctgagagttctacatcttgttccaagggcaaatactcctcaggcagctaggatgagggtctttttttttttttttaaagatttatttatttactatatgtaagtatactgttgctatcttcagacacaccagaagagggcatcagatgtcattacagattgttgtgagccaccatgtagttgctgggatttgaactcaggacctttggaagagcagtcagtgctcttaaccactgagccatctctccaggacctaggatgagggtcttaaagcccacacccacagtgacacagctattcaacatggccacacctaccccaacaagccacacctcctaaaagcgctactccctgggccaagcatacacaaaccaccacaccattctaccatgcatgcactttttaaaacactgtgttgtgcaaaatcaatatatacatatataattcagaattgccaattaaaaataaattaattttaagatcaagtcacatgtctctgtgtcctcgattatcttttagttcttcacagtgaaagcatgggtacattgtattaaaatatcacctgggctctgggtgtggccatgtaacactgcactccaaaggcagaggcaggtgcttggttctttgtgagccccaggccagtcaggtctacattttgagattctgcctcaacaaaccaaaccacaccacaaacaaagagaaaaggcagtgttcctggcccatacctttaatcccagtattcctaaggcagaggcaggtgaatctctgagttctgaatctacacagtgatttgtaagacagtcagggctacgcagagaaaccccatctcaaaataaaaccaacaacaaaaagattctatttatccagggagtggtggcacactcttttaatcccagtactggggaggcagaggcaggcagatgtctgggagttcaaggccagcctagacagctctgtctctcagggaggctggcaataataaggcaaagcaaaacccctaaaacaacaacaacaacaacaacaacaaaacaaaagacctgaagtaaagaaaaaaactaccctcaaaagtggaaaaaatcatattactacctataagcctacattttttacatcgtatgtatcaattttaaaaattaagataaaatgactagaaaaaaattgttactagcaagttaaaaataaatggtttctatcttcctacaaaaaggaacaataattcctaccgttgagacagagtatcactatatatcccagcccagcccagaactcaggagcctctgcctcagttccctatgattaatgaaaattttaaaaagaaaccacaatgcaaataataaagttcttagttgcgtgcctgtcgtgtggtatcagtgtaattcactgtggccaccgtcccttctgtcagtgagtgagcctgaaaatggatgtgctgtgggcgagctcttccatagctccagaaccccacaaaggagaccaggagaagctggaagaaacccagccaggggaacctgggtattggcgggaaactccatgaagctcatcaccccagaaccctggctctcctgagggtggagtccatgcctctccctctgggtcaggcttctgggcagtcagccagccacactgccacttgatggtttgtttgtttgcttctaaagacataaaatccaagcttatcaaacaaagtcacacttggccctgccatcttgagaggtaaattccaccattatctatgcacttcaacccctgcacagaacacttggttcccaggcgagctggcggctggctgcagggccgaccttcaccgactcaccctttcagccccctttcagtccaggagccagccagtcacgaggcaggcgtgccagtcacacagactagggaaatgcccgaaggtccagcccacaagctgggaggtttaaaaaaacctctttgaacttcagtttcctcgtttctataaaagtggcttgaggacaatagtctccttaccagctggtttgtgatgaggagtcatgaaaaggtgattaaacattgaccccagtgctggcctttggggaggactcaacacagaacagctgtggcctcaccagttccttagaaacctctcgctgggtggaaggacgaggtgaggctgggagaggtttgtacacccaaagggaaaaacatagagcttgtggctaaaaagcgcggggcaaaatgaggtcagctagtggaaacgtcatccaaaactttgccagagctctcttgagccaaagtcctcaaaatcacctactcctactgtgtgtgttagaatccactgaaacggaaaggggcatcctggcccggaagtggggttcccgttcatactgcatctttgcacaaattacaagctaggcatgggaggggcaagccagtgagctcgctttgagagcactggataatactcttgcttgctgctcctgcctctcctcgccctgcaaaaagcccacagacccatagaacaggagggaaagagacacgtcgcgtttttgagacgatgggcactggtaagagctgactcacagctgtccttgtttctcactcccgtggtgcctggcaatactccagatggtggaggcaccacagcctgtgtcctcaaatagagaccatgggaaaaaccatggtgggtgaatagtacagggctctgttcccctcccagttcacatgcgccagtcaccgtgagccttggggcagtattcttaccacagtcaacctgattcaccctcagatgagtgtggacaacggtgggaacaggaggaaaacaaagcccagagacaccagtgggagagaccgtgtcagggagagcaaggtaaggcctcttggaagaagatgaacctgtccaagaggctgggtggagttggggatggcagagcagggggtgatgaggttagtgtaggatgcagctattcaaagaaagtgcctataggggtcctggaagatcccagttccgtccacaggccagacacgtgagggaaacaagatgaactcaaaatcagcgccagccttcatgaccagagttgagttgagtttcataagctctgctgaggtcagaaatcagcagaaacgggacaggctctcagctgtctagtcccaagtctcttcctccaggaagacttcccggaccttcctcagtctcagatagcctcacaataactctgctactgtgtttgatcttctgcaggatgctgtgtgagctgcatgtgagttttgtgagttatgagtcacaggtggctccaaccctgctttctgtccttcagtctcccattcagcacccaacagaagatgctaggcaccactctgcatcctcaagggatatcgtatgaagcaagaggcaggttttcttgggtccacagcaacatcaaaaaagagcaaaacggacatgcaaataaatctattttagcatttgagacagacgtccaactgaggaacatgatcagaagatgccagccagtataaacatattttgaaaatatgtatttcatttcttatatatgtacatttgttctcgtcgaaaataaagatcaaatcaaatttcagagagatttaaaacacaaagaa

SEQ ID NO: 20 - DNA, 542 bp, Homo sapiens
tcgttccaatgagaatgaaggctgaggtgtgcgcctttttttttttttccttcttagtcgtgtgtacatcattgggaatggagggaaataaatgactggatggtcgctgctttttaagtttcaaattgacattccagacaagcggtgcctgagcccgtgcctgtcttcagatcttcacagcacagttcctgggaaggtggagccaccagcctctccttgaataactgggagatgaaacaggaagctctatgacacacttgatcgaatatgacagacaccgaaaatcacgactcagccccctccagcacctctacctgttgcccgccgatcacagccggaatgcagctgaaagattccctggggcctggttccaaccgcccactgtggactctgaggcctctgcatttgcgggtggtctgcctgtgatattttggtcatgggctggtctggtcggtttcccatttgtctggccagtctctatgtgtcttaatcccttgtccttcattaaaagcaaaactaaagaaaacagaaaaaaaaaaaaa

SEQ ID NO: 21 - DNA, 852 bp, Homo sapiens
tcgttccaatgagaatgaaggctgaggtgtgcgcctttttttttttttccttcttagtcgtgtgtacatcattgggaatggagggaaataaatgactggatggtcgctgctttttaagtttcaaattgacattccagacaagcggtgcctgagcccgtgcctgtcttcagatcttcacagcacagttcctgggaaggtggagccaccagcctctccttgtcctggaggctggaagtgcaaaaggaaggtgtcggcaagatcgtttttttctgagagctctctccttggcttgcagatggcagcctgctcctggcacagtcttttctctactcatgcccaaagttacggaggacccagcaaccatctcctgcagcccctggaaacctcttgactcttctgtgatgtccccagtgatccagcagccctggccttcttttgatggcttgaacatttggtcttcattgaacagtttgtatattggaaacttgccagcctccatccacattccaacctccgtctgcatccctcgaataactgggagatgaaacaggaagctctatgacacacttgatcgaatatgacagacaccgaaaatcacgactcagccccctccagcacctctacctgttgcccgccgatcacagccggaatgcagctgaaagattccctggggcctggttccaaccgcccactgtggactctgaggcctctgcatttgcgggtggtctgcctgtgatattttggtcatgggctggtctggtcggtttcccatttgtctggccagtctctatgtgtcttaatcccttgtccttcattaaaagcaaaactaaagaaaacagaaaaaaaaaaaaa

SEQ ID NO: 22 - DNA, 677 bp, Homo sapiens
tcgttccaatgagaatgaaggctgaggtgtgcgcctttttttttttttccttcttagtcgtgtgtacatcattgggaatggagggaaataaatgactggatggtcgctgctttttaagtttcaaattgacattccagacaagcggtgcctgagcccgtgcctgtcttcagatcttcacagcacagttcctgggaaggtggagccaccagcctctccttgggcaaagaggcagaggaatggagctcagagcttttagagaatatgggccagaaacaggaaggagtcaggacctgataacgggaaccagcggacagtgaacgcagtggagggccactggggccggagcagccgagagatttcaggagaataactgggagatgaaacaggaagctctatgacacacttgatcgaatatgacagacaccgaaaatcacgactcagccccctccagcacctctacctgttgcccgccgatcacagccggaatgcagctgaaagattccctggggcctggttccaaccgcccactgtggactctgaggcctctgcatttgcgggtggtctgcctgtgatattttggtcatgggctggtctggtcggtttcccatttgtctggccagtctctatgtgtcttaatcccttgtccttcattaaaagcaaaactaaagaaaacagaa

SEQ ID NO: 23 - DNA, 571 bp, Homo sapiens
acactcagggagtacaccatgtgaagactggacttaaacagctacaccaccagaagccgagagagaggctggaacatagccttccctttggagccctagcagatgctaatccagcgtgcgtcctgacagaggttgaagggggcttctcaagtcccaggtccagcttggtgtggttcagctactcaagagacatctgctgctaatggatgagcagtcaacctggacgcaggaaatcattttttatttggaataactgggagatgaaacaggaagctctatgacacacttgatcgaatatgacagacaccgaaaatcacgactcagccccctccagcacctctacctgttgcccgccgatcacagccggaatgcagctgaaagattccctggggcctggttccaaccgcccactgtggactctgaggcctctgcatttgcgggtggtctgcctgtgatattttggtcatgggctggtctggtcggtttcccatttgtctggccagtctctatgtgtcttaatcccttgtccttcattaaaagcaaaactaaagaaaacagaaaaaaaaaaaaa

SEQ ID NO: 24 - DNA, 732 bp, Homo sapiens
tcgttccaatgagaatgaaggctgaggtgtgcgcctttttttttttttccttcttagtcgtgtgtacatcattgggaatggagggaaataaatgactggatggtcgctgctttttaagtttcaaattgacattccagacaagcggtgcctgagcccgtgcctgtcttcagatcttcacagcacagttcctgggaaggtggagccaccagcctctccttgactcatgcccaaagttacggaggacccagcaaccatctcctgcagcccctggaaacctcttgactcttctgtgatgtccccagtgatccagcagccctggccttcttttgatggcttgaacatttggtcttcattgaacagtttgtatattggaaacttgccagcctccatccacattccaacctccgtctgcatccctcgaataactgggagatgaaacaggaagctctatgacacacttgatcgaatatgacagacaccgaaaatcacgactcagccccctccagcacctctacctgttgcccgccgatcacagccggaatgcagctgaaagattccctggggcctggttccaaccgcccactgtggactctgaggcctctgcatttgcgggtggtctgcctgtgatattttggtcatgggctggtctggtcggtttcccatttgtctggccagtctctatgtgtcttaatcccttgtccttcattaaaagcaaaactaaagaaaacagaa

SEQ ID NO: 25 - DNA, 529 bp, Homo sapiens
gttccaatgagaatgaaggctgaggtgtgcgcctttttttttttttccttcttagtcgtgtgtacatcattgggaatggagggaaataaatgactggatggtcgctgctttttaagtttcaaattgacattccagacaagcggtgcctgagcccgtgcctgtcttcagatcttcacagcacagttcctgggaaggtggagccaccagcctctccttgaataactgggagatgaaacaggaagctctatgacacacttgatcgaatatgacagacaccgaaaatcacgactcagccccctccagcacctctacctgttgcccgccgatcacagccggaatgcagctgaaagattccctggggcctggttccaaccgcccactgtggactctgaggcctctgcatttgcgggtggtctgcctgtgatattttggtcatgggctggtctggtcggtttcccatttgtctggccagtctctatgtgtcttaatcccttgtccttcattaaaagcaaaactaaagaaaacagaa

SEQ ID NO: 26 - DNA, 2797 bp, Mus musculus
gagtcagcacgagtcatctggttccagtgacaatgaagactgaggtgtctgctttgcagtttttttttttcttttcttgtctttttttttttttttcctaatcatgtggacatctctgagaatgaggggactgggtgactttgcagtgtctgctttctaagtttcaaagtgactttccaggcaagctgcgcatatcttgggatcttcacagcacagtggctgggaaggcaggcggacccgtctatcagcttctccctggtgggattcttgcgggggcagggatcgagtcaaaccttggaaatgacgtcattctgaactcatctgcctttatccagaagactaccaaagcaaaccagaggaccagagaacagcagctgctctggacaaagaggggaggacacccacacccacataccaagttctggttgacttctacagcagaagaagcaggagacacaagaagactcagagggactgaaatataagaagatcgatgccagatgttgttgtgatgacaacctgttgggttgaaggaccccaggaagacacagtccagattcacagggacagagccactcacctattgtcacatgcagcacagaataatgcagaggcatggcatcataacaattcctgaatggtgcttctcagaagatggtacttcttggggtctggtacctggactagtgaggcttctcaggggatgggaccccaacccagaatgacaacatcacctgataacttcatcttcatcattatcatcatcatcatcattgttgttattccttttgttttgttttgagattgtaataaaattatatcatttctccattgccctccctccctccaaaccctgtgatttacctctccttgctctctcaaattcatagcccctttccccccacaaattgctgttatacatatatacgtacatacacatatttctaaacacacaaaaacaacctgctcagcctggataatgttacttgtatgtatgttttcagacctgtccatttggcatcggctgaccagtcggtgtgcctctccctggggaagggttgttcttcctgctctttgctttctgtagttgcctgtagttctttgtgtagggttgaggtcttgtgggccaagatccaaaacttcactagccctgagtagttagccaggtttcgagtactggacaaagtttttctcttgttggggaaattctttgaaacacactttctctgggaccttcccagaatcgccaaatcacgcagtcagagagcagggcccatggctctattttaacaagatctgcatgcttgtgttgcgtgtgcaaacatttatcctcagtgtctagtgcttagacactgtttactgtggttaagtggcatggactgatagcatgaggatggcctgagaataggtgaataattggtcacaccagagagggaggggggagggggagagagggggaaggggaaggggagggggagagggaaagggaggtggggggaggaagaggaggaggagaaaagggatccaatccggacccctcacctcttaaggccccacttgggttaaacagtagccaggcacacaggacacagaagacagaggggacagagaaatagaaaagtgccaacactttaccaactgagttgccttctccttagcctaagaaaatattttaaaacaaaacaaaacaacccagccactttctaagtatacaaaaaactcaatgagtaacagtaaacataggttaataagtagtattaatattttctatggagatatcaggtctttgagaggtagctcagcttccgggttcacccattcactcattcagtccagcatgaagctggcatgggacgtccagcctggaaataagtaagtcttggatgagccaaaggctggagcaagagaggactcgctcccatcccaacaatgaagggatgcagggcagagtggtggaagggcagagatgctcccaaagacagggtaaagggagcctcaccccacattctgcccttagtttgggctggaaatgtccctagaagaacagagaaaccgaggagggatcatgagctagtcctcagcccatcgcccgtgctttgagctctctcttgacacagcaagcaagactgattatagacaaatgtccgttcttgctttctgcatccagggcctgagagatctcagacgcccatgcttgctcaggaagctgtttctgacattggcctgtttggtgaccagaaactgatgctgtttctccacgtggcctacagctggccagttggcagtggtacggctgagcctcagaatactgacaatggctgttttcatcccatgagcagattggtgtcaaggctggaaagaaagaaagatttttcactcaactcccactcttcccaaacaagccaacaagaaggcgaggtgtttggaggcctcccacaccctatacgtgaccctttttgtatttgctcaaggtggtagtaccacagttagaacctttggagtttttttggtatccttttagtctgtgttaatgtgtctctgctgtacttaaattctcttcaaaatgacctccacatcgatacatttcttggaattcacatgtgagtaagaaaagataagataggctggcaagatggttcagtggttaagagcgcggactgctcttccgaaggtcctgagttcaaatcccagcaaccacatggtggctcacaactatctgtaatgagatctgatgccctcttctggagtgtctgaagacagctacagtgtacttacattaaataaataaataaatctt

SEQ ID NO: 27 - DNA, 1836 bp, Mus musculus
gagtcagcacgagtcatctggttccagtgacaatgaagactgaggtgtctgctttgcagtttttttttttcttttcttgtctttttttttttttttcctaatcatgtggacatctctgagaatgaggggactgggtgactttgcagtgtctgctttctaagtttcaaagtgactttccaggcaagctgcgcatatcttgggatcttcacagcacagtggctgggaaggcaggcggacccgtctatcagcttctccctggtgggattcttgcgggggcagggatcgagtcaaaccttggaaatgacgtcattctgaactcatctgcctttatccagaagactaccaaagcaaaccagaggaccagagaacagcagctgctctggacaaagaggggaggacacccacacccacataccaagttctggttgacttctacagcagaagaagcaggagacacaagaagtctcctcagaagaacattgaccagcacgcctgcatcctttctgttctgacacacttgttacctggatgacttctttctcatcacccacgtgccaagagtgccatgtctcatctggaccagagactctgaggatcacaccaacagagacacaaatgacacttaaagaaagccacatcagcttttacaacttaccccccaataccgaatgtcatcaactcaatttaaatcattggatggttctgttctcagggccagagagtttcactaaacttcgtcgaacccttcggtataactgtcaactgtgcagagtgtgcttggtgtctggattctcagccttcagtgtaatcatgtttacatccccaggtgtcagaaaattccccctgacccttaacccccaacccttagcatgttggtgtcttagcttttacaatgtcattgctggacttgactgcttttcacaaaggtagctgcccaactagccatgccccaaccagtacattcttcttggttgcattcttaaattctcagactttttcttaacaaatgtgacaactgaatgtttattggtgttggtttggacttcatttaatcctgttaaaaccagtttgtgtcagtcacaatctggtggttcattgattgtccttctctgaatccgctcaccatcacatttgacacctaggctttcattttttccccctgagtcagggtttttctgtgtagccctgggtgtcccagaacctgctctgtagaccaggtgaactcagagattcacctgcctctgccttccaagtgctagaattcaaggtgtgcaccactaccctgagctttctacatttttatgtctttgaatatcaagtttgcagtgagaaaactgaggctcagggtggtggagtcacgtgaccaaagtctcaagactccagaggggagctgagctgagtggtgataagggcctgtgcttctgaaaccagggcacatggccagagcagagtagcagtcgacagtgacaaggacactagtgtcacacccaacagtccactatgaagtcacatacctgactcatgacaccctagcaataccaccagccaatccacttcctaacatctaaggatctccaaggactccagcaaatggtggtttggggagaccaaggtccctagcacagatctaagagtctccattgtggaacttcaaagtgttcagggttctatccgggcatccgtttgactgggaatccttttttacactgctccatatttgtccatttcaaaaatgagaatatactttgttcactgccttgatgaaattgatttcagtttaatcagttgcaccctgtttaatagacctgttataaaagatgtgcatttgtgtctatc

SEQ ID NO: 28 - DNA, 580 bp, Mus musculus
gagtcagcacgagtcatctggttccagtgacaatgaagactgaggtgtctgctttgcagtttttttttttcttttcttgtctttttttttttttttcctaatcatgtggacatctctgagaatgaggggactgggtgactttgcagtgtctgctttctaagtttcaaagtgactttccaggcaagctgcgcatatcttgggatcttcacagcacagtggctgggaaggcaggcggacccgtctatcagcttctccctgaataactgggagctgaaacaggaagccccatgacacagttgatcgaaaatgacacagacacagaaaaatcaggacgtgcccccagcagcacccctacctgctgcctgctgatcacggctgggaggcccgtccagggttcccacccgggaacggactcttagctactcagtgctcacgggtgctgggcctgcagagcttttcggatgctctcttacagctggtttgttatcttttaatcaatcaactaattaatctattactttatttattggccctccccatgtcttgatcctttcttcattaaaagcaaaaggaaagaaaa

SEQ ID NO: 29 - DNA, 933 bp, Mus musculus
gtgacaatgaagactgaggtgtctgctttgcagtttttttttttcttttcttgtctttttttttttttttcctaatcatgtggacatctctgagaatgaggggactgggtgactttgcagtgtctgctttctaagtttcaaagtgactttccaggcaagctgcgcatatcttgggatcttcacagcacagtggctgggaaggcaggcggacccgtctatcagcttctccctggtcacagaattgtgggtgatgagttctttgttctagaacttcctgtgtaatgaaactgccatccataattgttttcctgtggactgcttattaaaagaagtgatttttgatgaactaaactaggtgggattcttgcgggggcagggatcgagtcaaaccttggaaatgacgtcattctgaactcatctgcctttatccagaagactaccaaagcaaaccagaggaccagagaacagcagctgctctggacaaagaggggaggacacccacacccacataccaagttctggttgacttctacagcagaagaagcaggagacacaagaagactcagagggactgaaatataagaagatcgatgccagatgttgttgtgatgacaacctgttgggttgaaggaccccaggaagacacagtccagattcacagggacagagccactcacctattgtcacatgcagcacagaataatgcagaggcatggcatcataacaattcctgaatggtgcttctcagaagatggtacttcttggggtctggtacctggactagtgaggcttctcaggggatgggaccccaacccagaatgacaacatcacctgataacttcatcttcatcattatcatcatcatcatcattgttgttattccttttgttttgttttgagattgtaataaaattatatcatttctccattgcc

SEQ ID NO: 30 - DNA, 448 bp, Mus musculus
aggctcctttgcagtcagaaagatgaagactagtagtgggcttgccagggatgctggaaagctctttaaaggactctgacatctctgatccttgactttgctgctctggactcccaagtgttccagaataactgggagctgaaacaggaagccccatgacacagttgatcgaaaatgacacagacacagaaaaatcaggacgtgcccccagcagcacccctacctgctgcctgctgatcacggctgggaggcccgtccagggttcccacccgggaacggactcttagctactcagtgctcacgggtgctgggcctgcagagcttttcggatgctctcttacagctggtttgttatcttttaatcaatcaactaattaatctattactttatttattggccctccccatgtcttgatcctttcttcattaaaagcaaaaggaaagaaaa

SEQ ID NO: 31 - DNA, 589 bp, Mus musculus
caagctgcgcatatcttgggatcttcacagcacagtggctgggaaggcaggcggacccgtctatcagcttctccctgaagactaccaaagcaaaccagaggaccagagaacagcagctgctctggacaaagaggggaggacacccacacccacataccaagttctggttgacttctacagcagaagaagcaggagacacaagaagtctcctcagaagaacattgaccagcacgcctgcatcctttctgttctgacacacttgttacctggatgacttctttctcatcacccacgtgccaagagtgccatgtctcatctggaccagagactctgaggatcacaccaacagagacacaaatgacacttaaagaaagccacatcagcttttacaacttaccccccaataccgaatgtcatcaactcaatttaaatcattggatggttctgttctcagggccagagagtttcactaaacttcgtcgaacccttcggtataactgtcaactgtgcagagtgtgcttggtgtctggattctcagccttcagtgtaatcatgtttacatccccaggtgtcagaaaattccccctga

SEQ ID NO: 32 - DNA, 687 bp, Ovis aries
catgtcagggcagtggctgagtctgcttgccggggggtcaggaaggctgttcttccaggaagggctgcagagaccctgggaacaggactaggctgctcacaagtatgaagagaatgtcgggagaggaagtggtggctgtgagtcagcatgagtcatctcgttccaatgagaatgaagactgaggtgtgcgccttttttttctctctctctcactttttaaattttttttatttttttgagtctcaatcgtgtggacatcactgggaatgaagggaaataactgactgaatggtcgttgctttttaagtttcaaaccgacattccaggcgggttgtgcctgagccagcctcgggctttcagaccttcatagcctggtcctgagaaggtagagctctcagcttctccctgaataactgggagatgaaacaggaaactttatgacacacttgcttgaaaatgacacaggactcagcccctctgcaacacctctacctgctgcccacagccgagtgcgggggaagggctggccctgggacctgattccagccgccgtggactcgccgtccagtgcgatgtgtctgccatattgcggtcacggtctagtctggtcggtttcctatgtagctggccactcttggtgtatctttgccccttttccttcattaaaagcataactgacgaaaaatg

SEQ ID NO: 33 - DNA, 1469 bp, Sus scrofa
tggggggtggcctttagctttgcagttgcagctctcctcaccctggctgtgcgcccaggaccttccccggaggcagaaaaagcctctgagtttgctcagaatctgttgcaaggaaaggtgggctctgtcttgctgtacatttggtgggtctcacccttgaggtggatcagctttaagaagagtgacaggtcactagaggatttctttactacttggggctttccgagaagcgtctgtgcttcggtagttttggtcttataaaagtttcccacctgcagtagagtttataattacttaagagctttttataaatgaactcgatttcctttgcactcaggataatttacagagtcatcagtcacttcactgcagctgggagcttcacacgaaccctgcaaacacactttgaaaatgaaaccgagtgtaagtgggagcaaggaagcatgcctttgagggaaatagaaatgactgtccagcaaatggtgcctcctgtgtatctgctgataggtagaaacccttgacagtttttggaaaaaggaaaatcttaaatcattcaccaagattatgtgcatctcataaatgaactgataaagattccagctgaaaaggatcattccggtctaaacctcattaaaacacccctagatgatttatttaacataaaagcactggaaggcatgcctttctgccctcccttctcccctcttccaccccttaacatgttaccaacattatttctgcttgcgaattttttggtcggcatggatggcacctcaaatcacataagttaaactaaatcacatacagggcaaacaaaaacgactgcacttcccaatttcaaggacgtgacttgaacgtgaactagacatttgtcttcctaaaacccaggaaacctgaagattctagaaggaatccaaaggtaccctcccccccccagtggtctccttcctttgatgtaatccctggcacgtgtctctgacctccatttctgttagaactttgctccttagcctcagggctctctacctgcctctgctccatgactttatatccgtgattgcccttgggaaggagaatcttctttcaaaattgcacctgggcattttaaagtaaaaatgatgcaaatgcttaagttggccgaggaattaacttcggagtgaagaatgactagaataactgggagatgaaacaggaagccctatgacacacttgctcgaaaatgacacaggcacagaaaaatcaggactcagcccctccagcacctccacctgctgcccacagctggagtgcaggggacaagttgggcctgggacctgattccgacggccagggactccaagggcctccgagtttgctgatgatgtgtctgcgacattgtggttggggtctagtctgggcagttttctactgatctggccagtctctgtgtcctaatccccttctcttcattaaaagcataactaaagaaa

SEQ ID NO: 34 - DNA, 485 bp, Equus caballus
ttcttctttttttttttttttggtctcaatcgtggggacatcattgggaatggagggaaatcagtgactgtatggtcgttgctttttaagtttccaactggcgttccaggcaagccgtgcctgagccggtgtctgccgtgagatcttcagagcacggttcctgggaaggtagaaccattagcttctccctgaataactgggagatgaaacaggaagctctatgacacacttgatcgaaaatgacacagacgtagaaaaatcaggactccagcacctctacctgctgtcggctgctggaaggcaggtgacagctttgccctgggacctgattctagctgccgtggactccaagggcctccgcattcgctgatgatgtgtctgcgatattgaggtcgtggtctagtctggtcggtttcctatttatctggcgagtctctatgtgtcttaatcccttttcctccattaaaagcaaaacgaaagaaaaa

SEQ ID NO: 35 - RNA, 21 nt, Artificial sequence
  Description of Artifical Sequence: Synthetic polynucleotide
  Human CYTOR guide RNA
guaugaagagaaugucgggag

SEQ ID NO: 36 - RNA, 21 nt, Artificial sequence
  Description of Artifical Sequence: Synthetic polynucleotide
  Human CYTOR guide RNA
gcacaaguaugaagagaaugu

SEQ ID NO: 37 - DNA, 3357 bp, Mus musculus
ccatcctggtctatagagagagttccagaacagccagggctacagataaacccatctggaaaaacaaagttgaatgacccaagaggggttctcagagggtggcgtgtgctccctggcaagcctatgacatggccggggcctgcctctctctgcctctgaccctcagtggctcccatgaactccttgcccaatggcatctttttcctgcgctccttgggttattccagtctcccctcagcattccttcctcagggcctcgctcttctctctgctccctccttgcacagctggctctgtccacctcagatgtcacagtgctctctcagaggaggaaggcaccatgtaccctctgtttcccaggtaagggttcaatttttaaaaatggttttttgtttgtttgtttgtttgtttgtttgtttgtttttcaagacagggctcctctgtgtagtcctaactgtcttgaaactccctctgtagaccaggtcgacctcgaactcttgaaacctgccacggaccacccagtcaggtatggaggtccctggaatgagcgtcctcgaagctaggtgggtaagggttcggcggtgacaaacagaaacaaacacagaggcagtttgaatctgagtgtattttgcagctctcaagcaggggattttatacataaaaaaaaaaaaaaaaaaaaaaccaaacattacatctcttagaaactatatccaatgaaacaatcacagataccaaccaaaaccattgggcagagtaaagcacaaaaatcatccaagcattacaactctgaaaccatgtattcagtgaatcacaaacagaacaggtaacatcattattaatataaatcaccaaaatataacaattctaaaaggatgtatccagtgggggctgtcgtccaaggctagtggcagatttccaggagcaggttagtaaatcttaaccactgaactaactctccagccccatggtcaattattatttagcatctagtgcctaatttttttttataaatcttcactatgtaatttaaaactattttaattcttcctaattaaggctttctttaccatataccaaaattcacctccaatgacacacgcgtagccatatgaaattttattgttgggaaaatttgtacctatcataatagttttgtaaatgatttaaaaagcaaagtgttagccgggcgtggtggcacacgcctttaatccctgcactcgggaggcaggggcaggaggatttctgagtttgaggccagcctggtctacagagtgagttccaggacagccagggctacacagagaaaccctgtctcgaaccccccaccccccaaaaaaagcaaagtgttggtttccttggggataaagtcatgttagtggcccatctctaggcccatctcacccattattctcgcttaagatcttggcctaggctaccaggaacatgtaaataagaaaaggaataagagaaaacaaaacagagagattgccatgagaactacggctcaatattttttctctccggcgaagagttccacaaccatctccaggaggcctccacgttttgaggtcaatggcctcagtctgtggaacttgtcacacagatcttactggaggtggtgtggcagaaacccattccttttagtgtcttgggctaaaagtaaaaggcccagaggaggcctttgctcatctgaccatgctgacaaggaacacgggtgccaggacagaggctggaccccaggaacaccttaaacacttcttcccttctccgccccctagagcaggctcccctcaccagcctgggcagaaatgggggaagatggagtgaagccatactggctactccagaatcaacagagggagccgggggcaatactggagaagctggtctccccccaggggcaatcctggcacctcccaggcagaagaggaaacttccacagtgcatctcacttccatgaatcccctcctcggactctgaggtccttggtcacagctgaggtgcaaaaggctcctgtcatattgtgtcctgctctggtctgccttccacagcttgggggccacctagcccacctctccctagggatgagagcagccactacgggtctaggctgcccatgtaaggaggcaaggcctggggacacccgagatgcctggttataattaacccagacatgtggctgcccccccccccccaacacctgctgcctgagcctcacccccaccccggtgcctgggtcttaggctctgtacaccatggaggagaagctcgctctaaaaataaccctgtccctggtggatccagggtgaggggcaggctgagggcggccacttccctcagccgcaggtttgttttcccaagaatggtttttctgcttctgtagcttttcctgtcaattctgccatggtggagcagcctgcactgggcttctgggagaaaccaaaccgggttctaacctttcagctacagttattgcctttcctgtagatgggcgactacagccccacccccacccccgtctcctgtatccttcctgggcctggggatcctaggctttcactggaaatttccccccaggtgctgtaggctagagtcacggctcccaagaacagtgcttgcctggcatgcatggttctgaacctccaactgcaaaaaatgacacataccttgacccttggaaggctgaggcagggggattgccatgagtgcaaagccagactgggtggcatagttagaccctgtctcaaaaaaccaaaaacaattaaataactaaagtcaggcaagtaatcctactcgggagactgaggcagagggattgttacatgtctgaggccagcctggactacatagggtttcaggctagccctgtctacagagtaaggccctatttcaaaaacacaaacaaaatggttctcccagctgctaatgctcaccaggcaatgaagcctggtgagcattagcaatgaaggcaatgaaggagggtgctggctacaatcaaggctgtgggggactgagggcaggctgtaacaggcttgggggccagggcttatacgtgcctgggactcccaaagtattactgttccatgttcccggcgaagggccagctgtcccccgccagctagactcagcacttagtttaggaaccagtgagcaagtcagcccttggggcagcccatacaaggccatggggctgggcaagctgcacgcctgggtccggggtgggcacggtgcccgggcaacgagctgaaagctcatctgctctcaggggcccctccctggggacagcccctcctggctagtcacaccctgtaggctcctctatataacccaggggcacaggggctgcccccgggtcac

SEQ ID NO: 38 - DNA, 21 bp, Artificial sequence
  Description of Artifical Sequence: Synthetic polynucleotide
  gRNA CYTOR sequence
gtatgaagagaatgtcgggag

SEQ ID NO: 39 - DNA, 8477 bp, Homo sapiens
  TEAD1-203 HUMAN cdna:protein_coding
tgagaggcttcacattctgttggaaaatggatttaatccctaaaaaaagccttgccccattgggtcttcccagtaaatgttgagaggtacggtaggttgagtgtggtttagccttctggctgtgttatttatccatgcatgtttgctttttttggcctattttgtggctctgtattttagtccatgtgctcgtggctgtgcctgtgtaacctgcctggtagccatgcgttatgtattaagttggtgtgtcactgtcaccttcaaggatcagactgcaaaggataaggccctgcagcacatggcggccatgtcctcagcccagatcgtctcggccactgccattcataacaagctggggctgcctgggattccacgcccgaccttcccaggggcgccggggttctggccgggaatgattcaaacagggcagccaggatcctcacaagacgtcaagccttttgtgcagcaggcctaccccatccagccagcggtcacagcccccattccagggtttgagcctgcatcggccccagctccctcagtccctgcctggcaaggtcgctccattggcacaaccaagcttcgcctggtggaattttcagcttttctcgagcagcagcgagacccagactcgtacaacaaacacctcttcgtgcacattgggcatgccaaccattcttacagtgacccattgcttgaatcagtggacattcgtcagatttatgacaaatttcctgaaaagaaaggtggcttaaaggaactgtttggaaagggccctcaaaatgccttcttcctcgtaaaattctgggctgatttaaactgcaatattcaagatgatgctggggctttttatggtgtaaccagtcagtacgagagttctgaaaatatgacagtcacctgttccaccaaagtttgctcctttgggaagcaagtagtagaaaaagtagagacggagtatgcaaggtttgagaatggccgatttgtataccgaataaaccgctccccaatgtgtgaatatatgatcaacttcatccacaagctcaaacacttaccagagaaatatatgatgaacagtgttttggaaaacttcacaattttattggtggtaacaaacagggatacacaagaaactctactctgcatggcctgtgtgtttgaagtttcaaatagtgaacacggagcacaacatcatatttacaggcttgtaaaggactgaacatggttatttatatatatagatatctgtatatacacacacacatatgtgcacacacacactctctctccattatcgaacgactgactgtaaacctcaccacacagggtggtgccctggccccgaggtcaccccgacttttctaaatcttgtttgagtgaagtcattttttcatgtgttcatactatcattgtagctgtgaagttctggtacagttgtaaaaagagaaattgagttgtttctctatgttcttcagatgtgcagcccacaattcctcgggaaaggtgaacctgaacaacccaagtctctctctgcagagccctgtttctaattgtggtagaaaatattgagacagagcatttgccatgggacatttacagcctttatacaaatgtatttagttctcttttttccaacataaaattcttgttttaagatacaagtaaaattaatctttaaatataaatgtaaattagtacacaaaactaagaatctttagacttatctttgtaactaattagggtggaagttatgaaagaatgtaattcactaaattattttttaaatgaaacctttttttttctttttgaaaccaaatgttaaactatagccttaagaaatgcttggtagaagtgtcctaatgagacaaatttgtacttttatcctcaaggttaacactaatctcctaatccattaaactcttgaacaggtattacaaaggaagaaaacttcaccccttatccttaacatatatagtatatttaaaaaatataaaattgtattgtactaatgtgatgatggattatttaatgaaaaagaaaaaatggctctttttgcaataagtagatacatactgaaaaaatctaaacttacaatgtttatagtcttgtgtgtgcagttatattttatatggacgaccaaattttttattaagatgagtaaatatttgaaccactgaattttaataacaaaattttaaaattggcatgaatacggaatactgcactgtgagatgcaaagtatacagaatctgtggctgggagaaaatttcatcaaatagacaagtaaaaggctcatcagttttagcatctctgctccccagaaaattgtaagcatcctcaccagcctgtggatacattctttatttctagtgacccaatatgcatattaacctgctataactagggctatatgtgtaggtatgtgtatacatatacacaaatgcacatatagagttaacacatttagtgaacacttgtttagtgtcactcagtttgctaggtgctgatatgtacgtatatctcaatgtgtctgtagacttagatacatcctcttgaagcacatccatttctttagcgtctctcagtaagttacagtacttgtttgacttaggtttaagaggcccagctacctatctctgaccttttcaaataggctcatttgggagattcttttgccaggagagattcaactttccaatctaagtattccagagcattgcccaggcagagttggtttgatgtggccagatgttttgagttatttcccttaagtgtttcactggggagagaacagggagtgctcctccagcttcccaaagaaatatgtttttgtaagtggtaggaacatgtgcacacaatagaacatgaaataagttttttaacttgtaaaacatgtcaagatttttccaccaagctagaaaataaaaaacttagttctaccacatccaattaacttacacacccccttccctgtctcaacacctgctttgaccctgcttttctattattacatcagtcagcatcttgtggtccctaacatgaggatgtggctggctcgtgggaaacagcaaaacactaagcctgacctctcccaaattgggaagaccagaggagaaagtgcaaaactgtccccatttggaatgcccattccttctagaaaccagttggacagtgctcctctgcccttcataaacagactactgttgggtccctgattccaggctggcctgtgaaggattgccccaggtgtcccctttcacggttgtcacatttacagtgacttctgttgaacacccctcttagggatgtttcttttgctcttatttcctgcatctttccttaagggaagccccatcctctcccaggaccaggagtttatgaccaggcgagcacaaatggctaaaagccaagctgtcctagaacttcagtgggagagctgtctggttcatattctacccaggaatggtacttttcagtgcagccaggagggctcttgggatttcctttccaaagcacaaaaatactgggacccaagaagaacagctagaggacaactctgttggcacagagacggggacagcccagtctgctgacctcacagggtcagctgggcccccctggtgcttcaccacctgcatcctcttgctcagaatgcctttgcagttgagttttctgggtttctatgattgaccttgaggtttactccttgctcttacaacatttctaaggatttttaaaagtttacttcttgtcttgttcttctaaagctttctccaggacagatattttccctgtcttaaccactggtccagtcatcccagtgggcttctctttgtctctcccagattagacctttgggtgagattggcatcacaacatctaatctgagtctgtcttttgtccttcattctgtatggcagtctccctttgttataaaagctttctaaagcatactaaagaagccttcccagagccccgtcttgcttctcttccaggtgctctatcccctcgagaccctctggtgccaggcttgcttcacggccatcttgtgttgtcactgcagagtttggaggccagttttccacagcctaaacagggaggagctgcagaatggggctctggtctctgggcattcatttccctcatagaggctgagaataaaacaaggacttattcacacatgttctagaaccccagaatggcccaagttacctgagaccagggtttctcaaccttgacaccattgacattttggactgggtaattctttgttctgcagagctgtcctttgcactgtaggagatttactaatatccctggcctctacccagtagtaccactagcacctattccccacccagcgtgtctccagatattgtcaaatatcccatcgggtgcaaaatgatccctggtcaagatctgttgcccaagatgttacaggtcacaatgaccacatttgaaattgttttccctttcattttaccctgtgaaagcatctctcctagagccttgcaagaggcaggtgacattgtgtccatatttcttcctgtttcagaacttctgtttcacaacaatttctctctcgctacaagtattctttcactcagcactggggaagttgggaacagctggtcaccatcatccctttaatcaactcacacctgtttaaagagtgtttctgatttgaccttcatcccttagtttactggcgttaaaaaaagtctcagcaattttcattatttctcgtgggtctcattatcaaacctttacttatttcggcatatttcctctgggcttcttctagtttctgccttacaagcaatgctgttctgtaaatttattgaaacctctggaacatttcacctttagagatggaggatggaaggattggtaccagaagagggctaagatacgttttctgtcttgagctgaaagcacagtctactctccttcgttttgtcgatgagaaagttgaggccagaggggaggtgacatgtttagagtcacccagctggttagtgacagaaaaagcgtgagagttgtctaggattcctgccactttggtccctggcctctcctgggggaggctgctgttcttaggtgctctaagcttaatccctcagaatgtgtggacaggtcagcttagaagagatggggagattcaggatccccctgtgccagagcacagcctcaccggatgctgcttcccacactgaagtgtcctgtccgaccattgctatctgaggcatccacaagcaggtaggaaagctggcgagccattttacttcctgaggacaattccccagccacaggctctgagtcaaatttctatttggtaagcatcctagcagcaaagtcctgcactcagaccagccaaaaaacagcccccattccaagtacttggtgtcaaaagtccccgaacgacttttaaacccaagtcttcttaaggtttcagtactgtggtggctttagcagttgtttttgtgcaactataaattatttaaatcatctgagatgacagtcaattttacaaaccaggtacatattaatttgtataattttgtatatgctctggtacactacctgaactaacgaagggtagaactaattctgtttgtcagtgttcacacctgtaacattaggaggatatgtctgcattgcttatttctttatgttggtgtttctgtggcaaagccctgcacatggcatttctgaaaagccttaaatctttaagatgttgcatgtagggtatgcagtgcaaaaggctgcctcagaactgtgagcccttttgtaagctggaagcatttctcttactactgttacttttgtaggaagttttcaattcagagctgccaaagtgttcccgtaagcagtgccttagtaataccttagtcatgccgccagccttttcttacaccaattcctaatgttcatttacgaattggcccaatattggaaacaaaacaagcaaaaattgtcttcatttttgttttgtaagcccattttttctccagttctataggaaactgactgcttggtgtaaaatccgaaactggacacaagtcagttctttcaccacactcaaatgtatataccaaaacaaaaggttgcaacttcatagtttactatgaaaagcaaattgtactttttaatgttgccttttaaattcatgaccaaatacttagctatttgtgaatcttctgcactctagcatgaaagtgcctttggtttgagattccagcttagaaaagtgctgccataataacgataatttgtagagagaccaaaaatattttgagatcaccgtaatgcctttggtttaccgggatgagtaaccaaccacaggcctctgttcacaagagcacgacgtggtccccgcctgctgctagtctgtctgccactgggggcctcccaacatccatagcacacttcagcggaaggaccccagaaactgttgtgtttgtgtgtgctgatgacctagtgtgtcatttcacctcgtcacccagccctgcgtccggatgaggggacttctgcacaaatgacagaatctcggctggtggacagatactacagctttctcctcctccttgtgttcgtgttcagtctctgtggagactttcttttccattcaaatgacagtgcgcacttatctggtttacacaatgataccattttgaaagttggaagcctcaaactgagacgacagtgcagaacaaaacaaaagtgagttagggtcgttaaaattgaagtgttcttcttagggcaaacatgttgactccgagtattgtgtatgaatgtgctacgagaaacttccaaagagcaccattcacaatttggcattttcaaagaatgttccagccctcaaaggggcaactctttaaagtccttgttggcttttatccaaaccttgtagaaattgggaaagctgatagaggtaaggaagacgagtgaaaaggacaagaaggccaaacaccagccaaaaagaaactaggaaaaaaagattttctttgctaatatagatgtaaaaataacatcagacatctttgaaaattagcctctaaactcttaatacatacgttctgtgtgtctctacctggcgtctttaagaatatcctctctgggctctgaaattttaggagtgattcttatccactccaagttgtaagtatttgtagaaatttgtgcaaacaaacaaaaactatcaaatgaaaagaaaatgtactcaacctaacttatagttagcagctggaattctcaactcttccctgccagcactataccacagtgtggaagaaattagtcaaatgcttgttttcctgcttctcttttcaactgttactgtgctttgtttgaaagtagttttctctctcaaagccgttgcttatatcgttaagaatgaaggtttgtgtttaaaatttattgcattgcaaagggtagtttcactgaagtcatgcaccattaaataagatgaaatatttgtatttattgtcctacttcctaagccgtaacttcttttcctctgtgaatttgcattgagtcactcatgctacactacatcgctttagtatttgagatggcatttatgtttcctctcgtttatcatgaaatggggtcagattccatcagattccacctctgtcaggtggactcttgtctgccttccatgatgagattttttttctccttcccctttctttaagagaggctgacagatctaggtgtcaatcaattggaaaccagtctctgattttttttcattagttattttctatcattagtttcactgtgtaaattagatatcaactgcacttctttaaaaaaaaatacatctccctattacctccttgaaagatttacttctgtaggcctttttcaataggctcatgactgcagacaaggaaaaaaaaagtaaaaacaaaaacagtatgtgcctgaaaatgacaaaaaaaaaatttgtaacatttaaaaaagaaacctgaatagcctttaattctttaataatacacttaaattttatgtaaatcggttttcgccacgtgtgtttgttcacattctaaatgacttaatgggattctcacggtctgtgtctttgtgtcacgtgtataaaatgggcttgtgatgtaagcgtttcatctggtcagtggttcctttgatattgtactgctgctgggagtgggctgtggaacctgccttcgggtaactgggttcctcttgggtagattggagagatgggggtgggcgtgggcaaattctcacacatgttttcttaacctatttgcagaaactttcaaaaggcatttgattaaacctcttggcagtacagtattcttgtatttgttaacgtctgtgtttaggtactggtacctttttgttttaaaatgttctaagtgttggctttaaagtgaatttatctttagtatgatagttatatgaaaattataggatttgtgtgcagagaatttttttataaagtgctttgt

SEQ ID NO: 40 - DNA, 2554 bp, Equus caballus
  TEAD1-203 HORSE cdna:protein_coding
gactgccgccgccgccgccgccgcttcattgcacattcaagtggaaaattttcaggagtcagcagaaacattgtgtccaaaaaagactgagtcgcagttaccaccaaaccctggaggagactctctctggaaaacttcccttcggtttattttcttgaaaaggctccaggcttcggcttggaaaatccaaccgccaaaattgagcctagcagctggagcggcagcgagagccctgccgaaaacatggaaaggatgagtgactctgcagataagccgattgacaacgatgcggaaggggtctggagccccgacattgagcagagctttcaggaggccttggctatctatccaccatgtgggaggaggaaaatcatcttatcagacgaaggcaagatgtatggtaggaatgaattgatagccagatacatcaaactcaggacagggaagacgaggaccagaaaacaggtgtctagtcatatacaggtcttagcaagaaagaaagttcgagaaattcaagccgccattaaggtgtctagtcacattcaggttcttgccagaaggaaatctcgtgattttcattccaagctaaaggtaacaagcatggatcagactgcaaaggataaggccttgcagcacatggccgccatgtcgtcagcccagatcgtctcggccactgccattcacaacaagctggggctgcctgggattccacgccccaccttcccgggggcaccggggttctggccgggaatgatacaaacagggcagccaggatcctcacaagacgtcaagccctttgtgcagcaggcctaccccatccagcccgcagtcacggcccccattccagggtttgaacctgcatcagccccagctccctcggtccctgcctggcagggccgctccattggcacaaccaaacttcgcctggtggaattctcggctttcctcgaacagcagcgcgatccagactcgtacaacaaacacctcttcgtgcacattgggcatgccaaccattcttacagtgacccattgctcgaatcagtggacattcgtcagatttatgacaaatttcctgaaaagaaaggtggcttaaaggaactgtttggaaagggccctcaaaatgccttcttcctcgtaaaattctgggcggatttaaactgcaacattcaggatgatgctggcgccttctatggtgtaaccagtcagtacgagagttctgaaaatatgaccgtcacctgttccaccaaagtttgctcctttgggaagcaagtagtagaaaaagtagagacggagtatgcaaggtttgagaatggccgcttcgtataccgaataaaccgctccccgatgtgtgaatatatgatcaacttcatccacaagctcaaacacttaccagagaaatatatgatgaacagtgttttggaaaacttcacgattttattggtggtaacaaacagggatacacaagaaactctcctctgcatggcctgtgtatttgaagtttcaaatagtgaacatggagcacagcatcatatttacaggcttgtaaaggactgaacatggttatttatatatatagatacctgtatatacacacacacacgtgcgcacacacacacactctctccattatcgaatgactgactgtaaacctcaccacacaggggtggtgccctggctcctgaggtcaccccgacttttctaaatcctgtttgagtgaagtcattttttcatgtgttcatcccatcattgtagctgtgaagttctggtacagttgtaaaaagagaaatcgagttgtttctgtgttcttcagatctgcagcccacagttcctcgggaaaagcgaaccttacgaacgcaagtctctgtctgcagagaccggtttttctaattgtggtagaaagtcttgagacagagcatttgccatgggacatttacagcctttatacaaatgtatttagttcttttttttccaacataaaattcttgttttaagatacaagtaaaattaatctttaaatataaatgtaaattagtacacaaaactaagaatctttagacttatctttgtaactaattagggtggaagttataaaagaatgtaattcactaaattattttttaaatgaaacttttctttctttttgaaaccaaatgttaaaatatagccttaagaaatgcttggtagaagtatcctaatgagataaatttgtacttttttcctcaaggttaaaactaatctcctaatccattgaactcttgagcagatattgcaaaggaagaaaatttcaccccttatccttaacgtatatagtatatttaaaaatataaaattgtattgtactaatgtgatgattgattatttaatgaaaaaggaaagatggctctttttgcaataagtagataaatactgaaaatctaaacttacaatgtttatagtcttgtgtgtgcagttatattttatatggacaaccaaattttctattaagatgagtaaatatttgaaccactgaaatttaataacaaaaattgaaaattggcatgaatactgcactgtg

SEQ ID NO: 41 - DNA, 9964 bp, Mus musculus
  Tead1-201 MOUSE cdna:protein_coding
gagttcggtcctggcgttcatttcattcctgtcctcattccgcacattcttcgcatcgctcgcgccgcgccgcgccgcccgagccgagccgagcctccgcggccccgccgcccgccgcgggcgccccccagcacttcgcacactcgcttccagctcgcggggagtccgcgcgccggggcccgggcccggggcggccgcggcggggcgcaggccatgcgctgaccccccagcgcgcagcgtcgccggagcgcgggcagctgccccggcgcgccctgcccgtcccgggagccggcgaggccgggttggggctgcccggcgcgggagtaccgcagggagtaccggctggagtaacgcgggggcggcggcccagcgccccgaagtttgccgcgcccgctcgggctgccgtggtttgttttcttgaaaaggctccaggcttcggcttggaaaacccaaccgccaaaattgagcccagcagctggagcggcagcgagagccctgccgaaaacatggaaaggatgagcgactcggcagataagccgattgacaacgacgcggagggcgtctggagtcctgatattgagcagagtttccaggaggccctggctatctatccgccgtgtgggaggagaaaaatcatcttatcagacgaaggcaaaatgtatggtagaaatgaattgatagccagatacatcaaactcaggacgggaaagacaaggaccaggaagcaggtgtctagtcatatacaggtcttagcaagaaagaaagttcgagaaattcaagccgccattaaggtgtctagtcacattcaggttcttgccagaaggaaatctcgtgattttcattccaagctgaaggtaacaagcatggatcagactgccaaggacaaggccctgcagcacatggctgccatgtcatcagcccagatcgtctcggctactgccatccacaacaagctggggctgcctgggattccacgccccaccttcccggggggtccggggttctggcctgggatgatacagacaggacagccaggatcctcacaagacgtcaagccctttgtgcagcaggcctaccccatccagccagcagtcacagcccccattccagggtttgagcctacgtcagccccagccccctcagttcctgcctggcagggccgatccattggcacaaccaagcttcgcctggtggaattctccgctttccttgaacagcagagagacccagactcgtacaacaaacacctcttcgtgcacatcgggcatgccaaccattcttacagtgacccgttgctcgaatctgtggacattcgtcagatatatgacaaatttcctgaaaagaaaggtggcttgaaggagctgtttggaaagggccctcaaaacgccttcttcctcgtcaaattctgggcggacttaaactgcaatatccaagacgacgccggggccttttatggtgtgagcagtcagtatgagagttctgagaacatgacagttacctgttccaccaaagtgtgctcctttgggaaacaagtagtagaaaaagtagagacggagtatgcgaggttcgagaatggtcgattcgtgtaccgaataaaccgctcgccaatgtgtgaatatatgatcaacttcatccacaagctcaaacacctaccagagaaatatatgatgaacagtgttttggaaaacttcaccatattattggtggtaacaaacagggatacacaagaaactctgctctgcatggcctgtgtatttgaagtctcgaatagcgaacacggagcacagcaccatatctacaggcttgtgaaggactgaacctggttatttatatagagagatatctgtatatacacacacatatgtgcacacacacactctccattatcgaacgactgactgtaaacctcaccgcacagggtgctaccctggccccccaggtcccaccctgacctttctaatcctgttcgagtgaacttattttttttttccatgtgttcatgctatcattgtagctgtgaagttgtgatgcagttttttgtgtattcctcagatctgcaacccacaattccttggggaaggtgaatcttaccagcctaagctaagcctctctgcagccctgtttcctgttgtggtagaaaatactgagacagaggattggccacggggcattgactgcctttatacaaatgtatttagttctttttgtgtttttccaacataaaattcttgttttaagatacaagtaaaattaatctttaaatgtaaatgtaaattagtacaggaaaactaagattctttagacttatctttgtaactaattaggatggaagttatggaagaatgtaattcactaaattattttttaaatgaaatctttctttctttttaaaaccaaatgttaaactatagccttaagacatgcttggttgaactatcctaatgagacaaatttataccttcccccagcccccaaggttaaaactaataccctaattcattaaactcttgaaacaggtgtcacaaaggaggaagacatcacccctcacccttaacatatatagtatatttaaaaatgtaaaattgtattgtactaatgtgataattcattatttaatgaaaaagaaaagatggctctttttgcaataagtaggtaatactgagacaagtctaagcttacaacgttatagtcttgtgtgtgcagttacattttatatggtcaaccaaattttttacagagacgagttcacgtttgaaccactgaaatttaatagcaaatttaaaaattggcatgaatactgcactgttgagttgcaaaggatgcagagtcctgtggctggaagaaacttgtcatcaaccgagcaagcagaaggctcatcaggcttggtgtctctgctccccagaatgtcactgtcacaagcttcctggccagcctgtggatagattgttgctggtaacccagcgtgcataggaagcatctgtggctctagctctgtgttcttgcgcatgtggacattcagctctctgagctcctgtttcttgtcaatttgctagttgctcattgcctctctgcattatagacatggatgtattttctctaagggcatctttccataagcctcagtggcactttacacatatattcattctctctctctctctctctctctctctctctctctctctctctctctctctctctgtctctctctctctccccctcatcttttcaagcagattccctcattctcttaccaagagaatattccaaagcattgccctgcagagttggtctgatgtggccagcctcgggttacttccctaagtgctttttcactggggaagcaagaaaggttaaccctccacttcccagggaagataagaggaaagtaacagtttcattacacacactcacatgtgtgagcacatacaaatgtgcacacacacacacacaactgttaggaatatgtaaacataatagaaatggtacaaactttttactttaaaaaagcaaaaagcatggcttgttttttgcactaaggcaaaattctttatctaaaatctttatcaaaattctacatctgctatatccaggagacacacgcacctctttgccccagcatcagctctgactgcttatatcatattcagcatctttggtcctcagtgggtggatgccgctggcatgtagttaaaagaagcacattggattgactctgtcttctcctagcagcatccctcatccctgggaagaccagagaagaatgtgcaagatgtttccatttgcaatgtgcctcccttatgtaaagccaatggggcactggttctcctcaggagaacagcctaggttccctgtttctaagccagccctcaaaggaatggctaccctgagtttctcacctttatctgtctgcagaccaggtatttaaagatgtctcctggatgtgacattacttattaatcttttagacaaccctgttagggagggttctttacctttgatctcctatggccttattcaggaggaaacccctgtgtcttgagaccaggaagatatgaatgaatgggtacaaatgatctcctgtggctatctgtcatctcagaatgggatgggggaggggtctgtcactcaggagtagagcttctcctctgtaccactaaggctctggggatttacctcccaagtaccagctagaggatagtggttggcagtgggctggcaaagatgtcacagagtcagggtggtgtgtcggctgccccactgtcctcttcttcctaatgcctttctgggcagtaggagctggggggggcggtggatgacctgacttactttttgctcttaaaccagctataaaactctttaatgtatactaacccccgcccacactcttcccccaccttcttatttttacaccacacccatatctccacccctcccaacttctcattcttttttgcctttaaaaagaaaataaccttagtctcagttacagttatattgctatgatgttaacaatgcccaaaagcaagttggggaataaagtggacttatatttccacatcctagcccatcactgaaggcagtcagggcaggaacctgagactacaagttgatacagagaccatgaaggagtgctacttactggctttctcctcatggcttgctcagcctgctttcttatagaatccaggactatcagcctatggatggcgccgtgcacaatgggctttccctgccccctccccatcactgattaagaaaatgccctacagccatttcttatggagatgttttctcaattgaggttcccttttctgagatgactatagcttgtgttaagttgacataaaactagccagcacacccaccgtggccaatttgtgctgcccatatactcataggtgtggggacatccattggaacatggtcaagcctgccaggaaccacacttttaaactgagttctcttcccctagacccatccactctcaggagcccctcagccttgcagtgtcaaccagccagctctcacggttgccggagtttatgaatacagtggccctgtcatgtccagatgacgctgttttgttccatacaccccaccccacatcctgttcttacggtctctgctctgtcttcagcgctggtagctataagatctgtaaatcttgtagagtttccctgtcttaatcagtgacccagttatcccagagttgcttttatttcccaagtgaaagcctgggtttggggcgggaggtcatgttctaacctctcatcccagtctctaatccctggctccttcttccctcttctcagcttcctaaagcttaggacaccattgctgaaccctgccctcaccgttccctccccagagctgtctcacagtgactgggacagatctatcctggacatcttgcttagccactacatagtgtaaaggccatctttccaatgaaagagacataaaaatccacccaaaacttcttcagaacatgtcctgggatgcccagagtccagctacctggaggccagcaacattctggaccagttaattggccgtaccctgtgcttcgtcagaggattgaggattcctagccacttccacaattctcacagctcgttgccctgagttgtgtaaggttcagccttaattgaaaatggctgccctttctcttactggtcacattagcatattgatagccagtttttctccgatccatgaaatctcgtctatgacccccccacaccacaccccaaccccccgcccccaatccctcagtttttcaaggtcaagaagaaggaagtggcaggattcttcagcagcatcctttcctctgttagaggcctctcctgcacagccaccatctctttcctgcagctctttctctcttgcctgggaaagctggggaccgctggccagcagcctccctgtagccatctgactcctctttaaagagcatttctgatttgacttacagcctactctttcccagggtttaaaaagatagtcccctcccccacctggttctttctcacaagcccccccctcccccccgcctcctcctcatccttttccagatagggtctgtctcctcgacactgtttctgctgtccgcctcatgctccatgctgtctgtcctatctcttccatctttagggacgaagcagatctggatctgttccagaaggtgcctcatactcaaacgaaaagagagcacagtctatcccgcttcatcttgaagggatgagaggtgtctggtccaggctcccagctatttagtcacaggacaagggtgagggcttctcttccatctttggcctcgcctgggtcgaagccatctttccttggtgctctgtgcttaagtgacccctgagaatgcatggacagagtcagttcggatcccctagagctgtctggggaaccacaagtagatgatggcgaggctgaagcaagcgccttttgtttcctcagaggacagttctccagccgcaggctctgagtcaaatttctatttaccatacatcccagcagcaatgtcctgtccacacaccagccaaaagaaaacccttggtgttaaaattcttcagaggacttttagatccaggtcttctttcggcttcgataccacagtggcgttagccatcatttttatacaaccacatgttattgaagtcacctgatggtcagttttacaaaccaggtacctgtaatttgtataattttgtatatgctctggcgtcccatggaagggtagaatacctgtgtgttggtgtcctcacctgtgacattaggatgcttgagttcctggcctcttctatgttgatgtttctgtggctaagccctgcacgtgtcatttctgaaaagccttaaatcttagagaagtcacatcgcagggtgtcagtgtgacaggctgcctgggaaccgtgagcccttttgtaagctggaagcatttctcttactactgttacttttcatagttttcagttcacagctgccaaagcctcccagaaaagccgtgccttagtactaccttgtagccgccagccttttctcagcctgttctgggtgcccacttgctaattggccccgtatcagaagcaggacaagccaaaatccttctcatttgtgtttcaaaagcccgtttttaaatccagctctataggaagctgatgacttggtttcaaacaacctgaatcagaacccaagtcgattctttgaccatgctctcacgaacgtatccataccaaaactaaaggctgcacctccgcagcttgctatgaagagcgaattgtacttttcattgatgcctttttcaatccatgaccaaatacttagctatttgtgaatcttctgcactccagcttgaaagtgcctttggctcgagattccagcttagaaagtgccaccataataacgacaatttgtagagagaccaaaaatatttcgagatcaccataatgcctttggttaaccgggatgaataaccaaccgcaggcttgtattcatgagagcaccgagcaacgtgtggtccctgcctgctgtgagtctgcctgccaatggggaaccccaccaccactgtcctgtacagcagtgtggcagcggggagccctgcgaactcttgtgtctgtgtatgccgcctctcccggcatgtccaccaactcatcacccggctctgcatccctgggaaggaacttatgcgcaagcaccgaatcccggccagtgggcagacaccatggctctgccttcccccactgtgtccatgtccagactgtggagactcatccactggaacgacagtgtgcacttgcctgcctacacgtttggttgttggaagcctcgcattgagatgacagtgcagaacaaaaattaaaaatgggttcattagggtcattgcagttgaagtgtctctgggctgttttgctggctctggatgtccgaatgtgctgtgagggacttgcgaagagcacaccatttgcaactcggcattttcaaggacattctagccctcagccaactctttaaagtgtgtgtcagcttagagtaaaacctttttttttttaatctggaaaccccatactgtaaggagaaagaacaaaggaggcaaaaagaagccaagaaaaaaaaataggtgttttgttttgttttgtttttcttcctttgctgatgtaagtgtaaaagtaatgacagacaactctgaaagttagcctcaaaacactaccacacactcttctctccgcccctccctggtgtctaaggaatagccgctccgggctctgaaattgcccacgtgatttgtatccaccccaagttgtgggtatgtataaaagtccagtttttggttttttgttttgttttttcaaagaaaaaataactatcaaatggaaaggataatttctcagtgcaggttagagttagtggtttgctcttgtgtattcccccccaacccctggcagggacacaccacaacttgaagaacttagtcaaatgtgtgttctctcgtgcctctctctagtcattgctgtctcgtttgcagtagttttctctcctgagctctttgcttatatcttttaaaatgaaggtttttgtattttaaatttactgtgttgcaaagggtaggcctcactgaagtcacgcaccattaactaagatgagatatctgtatttattgttccttcctaagccgtaacttgttttctctgtgaatctgcattgggtcccgtggcccacactacatcattttagataaaagcagcctttgtgtgtgtgtcttgcacccaattcgttcacgaccatggggtcaggtcccactagacctgtcatacccagccttgctcagcctggcccttgtcggttcttactacggacattttgtctcttctctctctgaaagaggtgggcagaatccacacatccatcatgttagaaaacctgtctatgagttttgtgtttttatttttcaaattaattgttttctgtgattagtttcaatgtgtaaaatagattattaactgcacttctttaaaaaaaagaacaaaaggatgtacatctcctgttacctccttgaaagaccaacttctctaggcctttttcagtgggcttatgacttcagacaagggaaaaaaaacagtaaaaacaaaaatagtacgtgcctgaaaaatgacaaaaaaaaatctttttgtaacatttaaaaaacctgaaaagcctttacttctttgatatgctcaaattttatgtaaattggtttttgccacgtgtgttccttcggattctaagcgacttcatggcttctctgttgtctcgtgtaaagtgtataggatgggcttgtggcgtaagcatttcatctggtcagtggctcttttgatactgtactgctgctgggactgggctggaacctgagcctctagagggtgactgggttcctcttgggggagattgtggagaagagggtgaggtggctcatgttttcttaaactgtttgcagaaactttcaaaaggcatttggctaaacctcccggcagtacagtattctcgtactcattaacgtttgtgtctaggtactggtacctttctgtttaaaaaaatgttctaagtgttggctttaaagtgaatttatctttagtatgatagttatatgaaaattatagggtttgtgtgcagagaatttttttataaagtgctttgtaaaaaaaaaaacaaaaaaacaaatgtattctagctttcgcggtacatatgtgtgataactttaatacccatgacagttaagtgcaattatttcatcactctaaaaatgctatttttgtgtcagttcctgcaggtgttttcatgtctttgcaaagtgacacattttgatgccttcttgataaagtggtagacattttgtagctttctagaaactttgtatccatacggtatcaatgaaaaataaagaaaatgaaagtgtgggtcagctttcttatctgcaaca

SEQ ID NO: 42 - DNA, 3762 bp, Sus scrofa
  TEAD1-205 PIG cdna:protein_coding
accttgggagacacggctggggaaagatgagccgcgtccctgggtttttctcgtcctcctgtaagtgaccaggcacgctgaacaagcaaagacagctgggataataatgagagcttttatggtttattttcttgaaaaggctccaggcttcggcttggaaaacccggccgccaaaattgagcccagcagctggagcggcagtgagagccctgccgaaaatatggaaaggatgagtgactctgcagataagcccattgacaatgatgcagaaggggtctggagccccgacattgagcagagctttcaggaagccttggctatctatccaccatgtgggaggaggaaaatcatcttatcagatgaaggcaagatgtatggtaggaatgaattaatagccagatacatcaaactcaggacagggaagacgaggaccagaaaacaggtgtctagtcatatacaggtcttagcaagaaagaaagttcgagaaattcaagccgccattaaggtgtctagtcacattcaggttcttgccagaaggaaatctcgtgattttcattccaagctaaaggtaacaagcatggatcagactgcgaaggataaggccctgcagcacatggccgccatgtcatcagcccagatcgtctcggccactgccattcacaacaagctggggctgcccgggattccacgccccaccttcccaggggcgccggggttctggccgggaatgatacaaacagggcagcctggatcctcacaagacgtcaagcccttcgtgcagcaggcctaccccatccagccggcggtcacggcccccattccagggtttgagccagcgtcagccccagctccctcggtcccagcctggcagggccgctccattggcacaaccaaacttcgcctggtggaattctcagctttcctcgaacagcagcgagacccggactcgtacaacaaacacctcttcgtgcacattgggcatgccaaccattcttacagtgacccattgctcgagtcagtggacattcgtcagatttatgacaaatttcctgaaaagaaaggtggcttaaaggaactgtttggaaagggccctcaaaatgccttcttcctcgtaaaattctgggccgatttaaactgcaatattcaagatgatgccggggctttttatggtgtaacgagtcaatatgagagttctgaaaatatgacagtcacgtgttccaccaaagtttgctcctttgggaagcaagtagtagaaaaagtagagacggaatacgcgaggtttgagaatggccgatttgtataccgaataaaccgctccccgatgtgtgaatatatgatcaacttcatccacaagctcaaacacttaccagagaaatatatgatgaacagtgttttggaaaacttcacaattttattggtggtaacaaacagggatacacaagaaactctcctgtgcatggcctgtgtatttgaagtttcaaatagtgaacatggagcacagcatcacatttacaggcttgtaaaggactaaccatggttatttatatatatagatatctgtatatatacacacacacatatgtgcgcacacacacacacactctccatgatccaacgactgactgtaaacctcaccacgcaggggtgctgccctggccctgaggtcaccccaacttttctaaatcctgtttgagtgaagtcattttttcatgtgttcatactatcattctagctgtgaagttctggtacagttgtaaaaagagaaattgagttgtttctgtgtgttcttcagatccacagcccacagttcctcagaagggtgaaccgtgagaacccaggtctctgtctgcagagagctgtgtctcattgtggtaggaaaaaaaaaaaaaaaattgagacagagcatttaccattggacatttacagcctttatataaatgtatttagtgggtttttttttccaacataaaattcttgttttaagatacaagtaaaattaatctttaaatataaatgtaaattagtacacaaaactaagaatctttagacttatctttgtaactaattagggtggaagttatgaaagaatgtaattcactaaattattttttaaatgaaactttcctttctttttgaaaccaaatgttaaaatatagccttaagaaatgcttggtagaaatatcctaatgagacaaatttgtacttttttcctcaaggttaaaactaatctcctaatccattaaactcttgaaacaggtattacagaggaagaaaacttcaccccttatccttaacatatatagtatatttaaaaaatataaaattgtattgtactaatgtgatgattatttaatgaaaaagaaaagatggctcttttgcaataagtagataaataatgaaaatctaaacttacaatgtttatagtcttgtgtgtgcagttatattttatatggacaaccaaattttttattaagatgagtaaatatttgaaccactgaaatttaataacaaaaatttaaaattggcatggatactgcactgtgagctgcaaattctagaaaactctgtggctgggagaaatttcatccaccaaactcgtaaaaggctcatcagttttaggatctctgctccccagaaaaatgacaagcatcctcaccagcctatggataaattatttctggtgatccagtatgcatatgaatctgtgactctatgtgtgtgtgtgtatttgtgtatacatatctacacatatacatatagttatttgacacatatttattgaacatctattcagtgtcactcagtttgctaggtgctgatacgtgtgtgtttctcaacctgtgtctatagatctaggtgtattctctaaggacacccaccctcttgacatctccagtcataagactcgtttgactaagatcaaagaggctcagctgtctatctctgccctttcagacaagctcattggggaggttctcttcctaggaaaaagtcacctttccaaccctaatattccaaagtgttgcccaggcagaggtggtttgatgtggctacatgtcttgggttagttccataagtgcttcattgggaaggggacagggattccctctcccccccgccaccctaacttcctggagggaagtgacattgttataattgttgggaatatgttaacacaatagaacatgaaatgttttgtaagttgtgaaacatcacaacttttatatcaagccagaaattaaaaacttggttctgtcacattcaagttacagacatacccccttccctgtcccaccacctgctctgacccagcttatctactggttagcgtctggtggtcacgaacctgaaggtgtggctggcttgtggccaacaaaagaatgctggaccaggcgaaagtacagaacttgccctttttggaattctcacccctcacatacgccagtaggatggtgtgcatcttccctctaaggagactacagtttgttccctgattccaagtgggcctttgaggagtagcccagttgaccacccttccatctggtcttcagcccacacattaaacttctgccatggtcatcatatttataacttctcttggttacccctcttaaggatgtttcttttgctcctgtctcctgtgtctttactcaagggaacccccagtctctcaggaccaaggggtgtagatgatcttatgtgactaaaagctagtctgtcccagaacatcaggcaaagaaatatctggttcattttcttgcc

SEQ ID NO: 43 - protein, 426 aa, Homo sapiens
  TEAD1_HUMAN Transcriptional enhancer factor TEF-1 OS=Homo sapiens
MEPSSWSGSESPAENMERMSDSADKPIDNDAEGVWSPDIEQSFQEALAIYPPCGRRKIILSDEGKMYGRNELIARYIKLRTGKTRTRKQVSSHIQVLARRKSRDFHSKLKDQTAKDKALQHMAAMSSAQIVSATAIHNKLGLPGIPRPTFPGAPGFWPGMIQTGQPGSSQDVKPFVQQAYPIQPAVTAPIPGFEPASAPAPSVPAWQGRSIGTTKLRLVEFSAFLEQQRDPDSYNKHLFVHIGHANHSYSDPLLESVDIRQIYDKFPEKKGGLKELFGKGPQNAFFLVKFWADLNCNIQDDAGAFYGVTSQYESSENMTVTCSTKVCSFGKQVVEKVETEYARFENGRFVYRINRSPMCEYMINFIHKLKHLPEKYMMNSVLENFTILLVVTNRDTQETLLCMACVFEVSNSEHGAQHHIYRLVKD

SEQ ID NO: 44 - protein, 437 aa, Equus caballus
  HORSE TEA domain transcription factor 1
MERMSDSADKPIDNDAEGVWSPDIEQSFQEALAIYPPCGRRKIILSDEGKMYGRNELIARYIKLRTGKTRTRKQVSSHIQVLARKKVREIQAAIKVSSHIQVLARRKSRDFHSKLKVTSMDQTAKDKALQHMAAMSSAQIVSATAIHNKLGLPGIPRPTFPGAPGFWPGMIQTGQPGSSQDVKPFVQQAYPIQPAVTAPIPGFEPASAPAPSVPAWQGRSIGTTKLRLVEFSAFLEQQRDPDSYNKHLFVHIGHANHSYSDPLLESVDIRQIYDKFPEKKGGLKELFGKGPQNAFFLVKFWADLNCNIQDDAGAFYGVTSQYESSENMTVTCSTKVCSFGKQVVEKVETEYARFENGRFVYRINRSPMCEYMINFIHKLKHLPEKYMMNSVLENFTILLVVTNRDTQETLLCMACVFEVSNSEHGAQHHIYRLKLIS

SEQ ID NO: 45 - protein, 426 aa, Mus musculus
  TEAD1_MOUSE Transcriptional enhancer factor TEF-1
MEPSSWSGSESPAENMERMSDSADKPIDNDAEGVWSPDIEQSFQEALAIYPPCGRRKIILSDEGKMYGRNELIARYIKLRTGKTRTRKQVSSHIQVLARRKSRDFHSKLKDQTAKDKALQHMAAMSSAQIVSATAIHNKLGLPGIPRPTFPGGPGFWPGMIQTGQPGSSQDVKPFVQQAYPIQPAVTAPIPGFEPTSAPAPSVPAWQGRSIGTTKLRLVEFSAFLEQQRDPDSYNKHLFVHIGHANHSYSDPLLESVDIRQIYDKFPEKKGGLKELFGKGPQNAFFLVKFWADLNCNIQDDAGAFYGVSSQYESSENMTVTCSTKVCSFGKQVVEKVETEYARFENGRFVYRINRSPMCEYMINFIHKLKHLPEKYMMNSVLENFTILLVVTNRDTQETLLCMACVFEVSNSEHGAQHHIYRLVKD

SEQ ID NO: 46 - protein, 630 aa, Sus scrofa
  PIG TEA domain transcription factor 1
MTSPRPHPSGASSVLAFISFLSSFRTFLASLAPCRAARAEPSLCSRRRGPAARRGRPPSTLQTRFHPAGQSARRGPGPGRPRPGTGHAVKPPTPSTFARSRGQQPRTPSRPRGRSSANRGGVAQPGDWEPGREPGSELKAREAAPKFASDSPGAAAAPFAEVYFLEKAPGFGLENPAAKIEPSSWSGSESPAENMERMSDSADKPIDNDAEGVWSPDIEQSFQEALAIYPPCGRRKIILSDEGKMYGRNELIARYIKLRTGKTRTRKQVSSHIQVLARKKVREIQAAIKVSSHIQVLARRKSRDFHSKLKVTSMDQTAKDKALQHMAAMSSAQIVSATAIHNKLGLPGIPRPTFPGAPGFWPGMIQTGQPGSSQDVKPFVQQAYPIQPAVTAPIPGFEPASAPAPSVPAWQGRSIGTTKLRLVEFSAFLEQQRDPDSYNKHLFVHIGHANHSYSDPLLESVDIRQIYDKFPEKKGGLKELFGKGPQNAFFLVKFWADLNCNIQDDAGAFYGVTSQYESSENMTVTCSTKVCSFGKQVVEKVETEYARFENGRFVYRINRSPMCEYMINFIHKLKHLPEKYMMNSVLENFTILLVVTNRDTQETLLCMACVFEVSNSEHGAQHHIYRLVKD

1. A method of:
a) treating a subject having or being at risk of developing skeletal muscle atrophy, starvation, sarcopenia, cachexia (e.g. cancer cachexia or AIDS cachexia), sepsis, diabetes (particularly type I diabetes), muscular dystrophy (e.g. Duchenne Muscular Dystrophy, Becker's MD, Congenital MD, Myotonic dystrophy (e.g. type I and type II), Limb-girdle MD, Emery-Dreifuss MD, Distal MD and Facioscapulohumeral Muscular Dystrophy), Chronic Heart Failure (e.g. diaphragm muscle atrophy resulting from Chronic Heart Failure), Chronic Obstructive Pulmonary Disease (e.g. diaphragm muscle atrophy resulting from Chronic Obstructive Pulmonary Disease), Amyotrophic Lateral Sclerosis (ALS), Spinal Muscular Atrophy, Guillain-Barré syndrome, intensive care unit acquired weakness, immobilization resulting from bone fractures (e.g. hip (femur neck) fractures) or immobilization resulting from an infection;
b) promoting myogenesis in skeletal muscle of a subject, wherein the subject has or is at risk of developing skeletal muscle atrophy, starvation, sarcopenia, cachexia (e.g. cancer cachexia or AIDS cachexia), sepsis, diabetes (particularly type I diabetes), muscular dystrophy (e.g. Duchenne Muscular Dystrophy, Becker's MD, Congenital MD, Myotonic dystrophy (e.g. type I and type II), Limb-girdle MD, Emery-Dreifuss MD, Distal MD and Facioscapulohumeral Muscular Dystrophy), Chronic Heart Failure (e.g. diaphragm muscle atrophy resulting from Chronic Heart Failure), Chronic Obstructive Pulmonary Disease (e.g. diaphragm muscle atrophy resulting from Chronic Obstructive Pulmonary Disease), Amyotrophic Lateral Sclerosis (ALS), Spinal Muscular Atrophy, Guillain-Barré syndrome, intensive care unit acquired weakness, immobilization resulting from bone fractures (e.g. hip (femur neck) fractures) or immobilization resulting from an infection;
c) increasing skeletal muscle mass in a subject, wherein the subject has or is at risk of developing skeletal muscle atrophy, starvation, sarcopenia, cachexia (e.g. cancer cachexia or AIDS cachexia), sepsis, diabetes (particularly type I diabetes), muscular dystrophy (e.g. Duchenne Muscular Dystrophy, Becker's MD, Congenital MD, Myotonic dystrophy (e.g. type I and type II), Limb-girdle MD, Emery-Dreifuss MD, Distal MD and Facioscapulohumeral Muscular Dystrophy), Chronic Heart Failure (e.g. diaphragm muscle atrophy resulting from Chronic Heart Failure), Chronic Obstructive Pulmonary Disease (e.g. diaphragm muscle atrophy resulting from Chronic Obstructive Pulmonary Disease), Amyotrophic Lateral Sclerosis (ALS), Spinal Muscular Atrophy, Guillain-Barré syndrome, intensive care unit acquired weakness, immobilization resulting from bone fractures (e.g. hip (femur neck) fractures) or immobilization resulting from an infection;
d) improving skeletal muscle function in a subject, wherein the subject has or is at risk of developing starvation, sarcopenia, cachexia (e.g. cancer cachexia or AIDS cachexia), sepsis, diabetes (particularly type I diabetes), muscular dystrophy (e.g. Duchenne Muscular Dystrophy, Becker's MD, Congenital MD, Myotonic dystrophy (e.g. type I and type II), Limb-girdle MD, Emery-Dreifuss MD, Distal MD and Facioscapulohumeral Muscular Dystrophy), Chronic Heart Failure (e.g. diaphragm muscle atrophy resulting from Chronic Heart Failure), Chronic Obstructive Pulmonary Disease (e.g. diaphragm muscle atrophy resulting from Chronic Obstructive Pulmonary Disease), Amyotrophic Lateral Sclerosis (ALS), Spinal Muscular Atrophy, Guillain-Barré syndrome, intensive care unit acquired weakness, immobilization resulting from bone fractures (e.g. hip (femur neck) fractures) or immobilization resulting from an infection; or
e) preventing or treating skeletal muscle atrophy and/or skeletal muscle dysfunction in a subject, optionally wherein the subject has or is at risk of developing starvation, sarcopenia, cachexia (e.g. cancer cachexia or AIDS cachexia), sepsis, diabetes (particularly type I diabetes), muscular dystrophy (e.g. Duchenne Muscular Dystrophy, Becker's MD, Congenital MD, Myotonic dystrophy (e.g. type I and type II), Limb-girdle MD, Emery-Dreifuss MD, Distal MD and Facioscapulohumeral Muscular Dystrophy), Chronic Heart Failure (e.g. diaphragm muscle atrophy resulting from Chronic Heart Failure), Chronic Obstructive Pulmonary Disease (e.g. diaphragm muscle atrophy resulting from Chronic Obstructive Pulmonary Disease), Amyotrophic Lateral Sclerosis (ALS), Spinal Muscular Atrophy, Guillain-Barré syndrome, intensive care unit acquired weakness, immobilization resulting from bone fractures (e.g. hip (femur neck) fractures) or immobilization resulting from an infection; or
by administering to the subject a Cytor agonist and/or a Tead1 antagonist,
wherein the Cytor agonist
(i) comprises RNA comprising a nucleotide sequence as set forth in any one of SEQ ID NOs: 1-15 or a nucleotide sequence with at least 80% sequence identity to a sequence as set forth in any one of SEQ ID NOs: 1-15, wherein the RNA promotes myogenesis in skeletal muscle;
(ii) comprises a nucleic acid molecule encoding Cytor RNA or an orthologue thereof or a functionally equivalent fragment or variant of said Cytor RNA or orthologue, wherein the nucleic acid molecule comprises a nucleotide sequence as set forth in any one of SEQ ID NOs: 20-34 or a nucleotide sequence with at least 80% sequence identity to a sequence as set forth in any one of SEQ ID NOs: 20-34, wherein the nucleic acid molecule encodes an RNA that promotes myogenesis in skeletal muscle; or
(iii) comprises a nucleic acid molecule encoding a protein that induces expression of endogenous Cytor RNA, wherein the protein comprises a domain that binds to the Cytor promoter operably linked to a transcriptional activator, and wherein the protein comprising a domain that binds to the Cytor promoter is a CRISPR associated protein (e.g. a nuclease-deficient CRISPR associated protein, e.g. dCas9) and the agonist further comprises a guide RNA capable of hydridising with the Cytor promoter nucleic acid; and/or
wherein the Tead1 antagonist
(i′) is verteporfin;
(ii′) is an inhibitor, wherein the inhibitor is an aptamer, a ribozyme, a siRNA, a shRNA, an antisense oligonucleotide, an antibody or an antibody mimetic, wherein the antibody mimetic is preferably selected from affibodies, adnectins, anticalins, DARPins, avimers, nanofitins, affilins, Kunitz domain peptides, Fynomers, trispecific binding molecules and probodies; or
(iii′) is a nucleotide based inhibitor comprising
(a) a nucleic acid sequence which comprises or consists of a nucleic acid sequence being complementary to at least 12 continuous nucleotides of a nucleic acid sequence selected from SEQ ID NOs: 39 to 42,
(b) a nucleic acid sequence which comprises or consists of a nucleic acid sequence which is at least 70% identical to the complementary strand of one or more nucleic acid sequences selected from SEQ ID NOs: 39 to 42,
(c) a nucleic acid sequence which comprises or consists of a nucleic acid sequence according to (a) or (b), wherein the nucleic acid sequence is DNA or RNA, or
(d) an expression vector expressing the nucleic acid sequence as defined in any one of (a) to (c), preferably under the control of a skeletal muscle-specific promoter.

2-5. (canceled)

6. The method of claim 1, wherein the subject has or is at risk of skeletal muscle atrophy.

7. The method of claim 1, wherein the subject is heterozygous or homozygous for the G allele of cis-eQTL rs74360724.

8. The method of claim 1, wherein the subject (i) is at least 45 years old, (ii) is inactive or immobile, and/or (iii) has or is at risk of developing sarcopenia.

9. The method of claim 1, wherein the agonist comprises a nanoparticle containing the RNA or the nucleic acid molecule as defined in claim 1, item (ii).

10. (canceled)

11. (canceled)

12. The method of claim 1, wherein the agonist increases the amount of Cytor RNA in skeletal muscle directly.

13. (canceled)

14. The method of claim 1, wherein the agonist comprises RNA comprising a nucleotide sequence as set forth in any one of SEQ ID NOs:1-15 or a nucleotide sequence with at least 80% sequence identity to a sequence as set forth in any one of SEQ ID NOs:1-15.

15. The method of claim 9, wherein the nanoparticle is a liposome.

16-19. (canceled)

20. The method of claim 1, wherein the nucleic acid molecule comprises a nucleotide sequence as set forth in any one of SEQ ID NOs:20-34 or a nucleotide sequence with at least 80% sequence identity to a sequence as set forth in any one of SEQ ID NOs:20-34.

21. The method of claim 9, wherein the nanoparticle is a viral vector.

22-24. (canceled)

25. The method of claim 1, wherein the agonist inhibits degradation of endogenous Cytor RNA.

26. The method of claim 1, wherein the agonist that inhibits degradation of endogenous Cytor RNA is an RNA binding protein.

27. The method of claim 1, wherein the agonist is a small molecule.

28. The method of claim 1, wherein the antagonist inhibits the expression and/or the activity of Tead1.

29-31. (canceled)

32. A modified farmed animal or farmed fish which has an increased amount of Cytor RNA or a decreased amount of or no Tead1 RNA in its skeletal muscle in comparison to a corresponding unmodified non-human animal, preferably wherein the animal has been genetically-modified to increase the expression of Cytor RNA and/or to decrease or prevent the expression of Tead1 RNA.

33. The modified farmed animal or farmed fish of claim 32, wherein the farmed animal is a poultry, pig, cattle, sheep or goat or the farmed fish is a salmon, tilapia or tuna.

34-36. (canceled)

37. A method for producing the modified farmed animal or farmed fish of claim 32, the method comprising:
(i) providing a cell of a farmed animal or farmed fish which has been genetically-modified such that myoblast cells derived from said cell express an increased amount of Cytor RNA and/or a decreased amount of or no Tead1 RNA or protein compared to unmodified myoblast cells; and
(ii) generating a genetically-modified farmed animal or farmed fish from said genetically-modified cell of a farmed animal or farmed fish.

38. An in vitro method for:
a) producing muscle fibres comprising culturing modified myoblasts which have increased amounts of Cytor RNA and/or a decreased amount of or no Tead1 RNA or protein in comparison to unmodified myoblasts under conditions suitable to produce muscle fibres;
b) determining the risk of developing skeletal muscle atrophy (e.g. sarcopenia) in a subject comprising determining the genotype of the subject
at the cis-eQTL rs74360724, wherein when the subject is heterozygous or homozygous for the G allele they have an increased risk of developing muscle atrophy (e.g. sarcopenia) compared to a subject that is homozygous for the A allele, and/or
at the cis-eQTL rs79200838, wherein when the subject is heterozygous or homozygous for the T allele they have an decreased risk of developing muscle atrophy (e.g. sarcopenia) compared to a subject that is homozygous for the C allele;
c) predicting the performance of a subject in an activity associated with fast-twitch muscle (e.g. an athlete, e.g. a sprinter) comprising determining the genotype of the subject
at the cis-eQTL rs74360724, wherein when the subject is heterozygous or homozygous for the A allele they have an increased likelihood of outperforming a subject that is homozygous for the G allele, and/or
at the cis-eQTL rs79200838, wherein when the subject is heterozygous or homozygous for the C allele they have an decreased of outperforming a subject that is homozygous for the T allele;
d) predicting the capability of a subject to produce fast-twitch muscle comprising determining the genotype of the subject
at the cis-eQTL rs74360724, wherein when the subject is heterozygous or homozygous for the A allele they have an increased capability of producing fast-twitch muscle compared a subject that is homozygous for the G allele, and/or
at the cis-eQTL rs79200838, wherein when the subject is heterozygous or homozygous for the C allele they have an decreased capability of producing fast-twitch muscle compared a subject that is homozygous for the T allele.

39. The in vitro method of claim 38, wherein the myoblasts have been genetically-modified to increase the expression of Cytor RNA and/or to decrease the expression of Tead1 RNA or protein.

40. The in vitro method of claim 38, wherein the myoblasts comprise a nucleic acid molecule encoding Cytor RNA operably linked to a heterologous promoter and/or a mutated or deleted gene encoding Tead1 RNA.

41-46. (canceled)
